(19) United States
(12) Patent Application Publication
(10) Pub. No.: US 2020/0011872 A1
(43) Pub. Date: Jan. 9, 2020

(54) METHOD, ARRAY AND USE THEREOF

(71) Applicant: IMMUNOVIA AB, Lund (SE)

(72) Inventors: Carl BORREBAECK, Lund (SE); Anna Sandström GERDTSSON, Karlshamm (SE); Christer WINGREN, Södra Sandby (SE)

(21) Appl. No.: 16/097,420

(22) PCT Filed: May 10, 2017
(86) PCT No.: PCT/EP2017/061202

§ 371 Date: Oct. 29, 2018

(30) Foreign Application Priority Data
May 10, 2016 (GB) 1608192.9

(51) Int. Cl. G01N 33/574; G01N 33/543; G01N 33/563

(52) U.S. Cl. CPC G01N 33/57438; G01N 33/54366; G01N 33/563; G01N 33/5436; G01N 33/57484

(57) ABSTRACT

The present invention provides a method for diagnosing or determining a pancreatic cancer-associated disease state comprising or consisting of the steps of: (a) providing a sample from an individual to be tested; and (b) determining a biomarker signature of the test sample by measuring the presence and/or amount in the test sample of one or more biomarker selected from the group defined in Table A; wherein the presence and/or amount in the test sample of the one or more biomarker selected from the group defined in Table A is indicative of the pancreatic cancer associated disease in the individual; uses and methods of determining a pancreatic cancer-associated disease state, and methods of treating pancreatic cancer, together with arrays and kits for use in the same.

### FIELD OF INVENTION

[0001] The present invention provides methods for determining a pancreatic cancer-associated disease state (early pancreatic cancer presence, pancreatic cancer stage and/or pancreatic cancer presence), as well as arrays and kits for use in such methods.

### BACKGROUND

[0002] Pancreatic ductal adenocarcinoma (PDAC) is one of the deadliest cancers with a 5-year survival rate of 3-4%. A key driver behind this poor prognosis is the current inability to diagnose patients at an early stage. Data supports that it takes more than five years from tumor initiation until the acquisition of metastatic ability (Yachida et al., 2010), which clearly demonstrates a window of opportunity for early detection if accurate markers were available. At the time of diagnosis, patients have often developed late-stage disease, and only approximately 15% of the patients have resectable tumors (Conlon et al., 1996; Sohn et al., 2000). The 5-year survival of these patients, displaying large resected tumors, is only 10-20% (Conlon et al., 1996; Sohn et al., 2000). However, the 5-year survival increases to 30-60% if tumors 520 mm (Stage I-II) can be resected (Furukawa et al., 1996; Shimizu et al., 2005). The late diagnosis (Stage III-IV) is due to unspecific clinical symptoms in combination with the lack of markers for early diagnosis, something which is addressed in this study. Interestingly, studies suggest that pancreatic tumors could be resectable as early as six months prior to clinical diagnosis at an asymptomatic stage (Gangi et al., 2004; Pelaez-Luna et al., 2007).

[0003] The so far most evaluated marker for PDAC, CA19-9, suffers from poor specificity, with elevated levels in several other indications, as well as a complete absence in patients that are genotypically Lewis a-b- (5% of the population). Consequently, the use of CA19-9 for pancreatic cancer screening is not recommended (Locker et al., 2006). Today, no other single biomarker has been shown to accurately diagnose PDAC, although recent discovery studies have demonstrated that both exosomes and nucleosomes contain information associated with pancreatic cancer (Bauden et al., 2015; Melo et al., 2015). However, there is a need to provide biomarkers and biomarker panels with improved sensitivity and specificity.

### SUMMARY OF THE INVENTION

[0004] Accordingly, a first aspect of the invention provides a method for diagnosing or determining a pancreatic cancer-associated disease state comprising or consisting of the steps of:
[0005] (a) providing a sample from an individual to be tested; and
[0006] (b) determining a biomarker signature of the test sample by measuring the presence and/or amount in the test sample of one or more biomarker selected from the group defined in Table A;

[0007] wherein the presence and/or amount in the test sample of the one or more biomarker selected from the group defined in Table A is indicative of the pancreatic cancer-associated disease in the individual.

[0008] Thus, in one embodiment, the method comprises determining a biomarker signature of the test sample, which enables a diagnosis to be reached in respect of the individual from which the sample is obtained.

[0009] By “pancreatic cancer-associated disease state” we include pancreatic cancer presence per se, pancreatic cancer stage and/or presence of related lesions such as intraductal papillary mucinous neoplasms (see below). In particular, we include the presence and/or stage of pancreatic ductal adenocarcinoma (PDAC).

[0010] In specific embodiments, the methods of the invention permit:
[0011] (i) diagnosis and/or staging of early pancreatic cancer; and/or
[0012] (ii) diagnosis and/or staging of pancreatic cancer (L e. early or late).

[0013] By “biomarker” we mean a naturally-occurring biological molecule, or component or fragment thereof, the measurement of which can provide information useful in the diagnosis and/or prognosis of pancreatic cancer. Thus, in the context of Table A, the biomarker may be the naturally-occurring protein, or a polypeptide fragment or carbohydrate moiety thereof (or, in the case of Lewis x and sialyl Lewis x, a carbohydrate moiety per se). Alternatively, the biomarker may be a nucleic acid molecule, such as a mRNA, cDNA or circulating tumour DNA molecule, which encodes the protein or part thereof.

[0014] By “diagnosis” we mean or include determining the presence or absence of a disease state in an individual (e.g., determining whether an individual is or is not suffering from early pancreatic cancer or pancreatic cancer (early or late)).

[0015] By “staging” we mean or include determining the stage of a pancreatic cancer, for example, determining whether the pancreatic cancer is stage I, stage II, stage III or stage IV (e.g., stage I, stage II, stage I-II, stage III-IV or stage I-IV).

[0016] By “early pancreatic cancer” we include or mean pancreatic cancer comprising or consisting of stage I and/or stage II pancreatic cancer.

[0017] Alternatively or additionally, by “early pancreatic cancer” we include or mean stage I and/or stage II pancreatic cancer as determined by the American Joint Committee on Cancer (AJCC) TNM system (e.g., see: http://www.cancer.org/cancer/pancreaticcancer/detailedguide/pancreatic-cancer-staging and AJCC Cancer Staging Manual (7^{th} ed.), 2011, Edge et al., Springer which are incorporated by reference herein.

[0018] The TNM cancer staging system is based on 3 key pieces of information:
[0019] T describes the size of the main (primary) tumour and whether it has grown outside the pancreas and into nearby organs.
[0020] N describes the spread to nearby (regional) lymph nodes.
[0021] M indicates whether the cancer has metastasized (spread) to other organs of the body. (The most common sites of pancreatic cancer spread are the liver, lungs, and the peritoneum—the space around the digestive organs.)

[0022] Numbers or letters appear after T, N, and M to provide more details about each of these factors.

[0023] T categories

[0024] TX: The main tumour cannot be assessed.

[0025] T0: No evidence of a primary tumour.

[0026] Tis: Carcinoma in situ (the tumour is confined to the top layers of pancreatic duct cells). (Very few pancreatic tumours are found at this stage.)

[0027] T1: The cancer is still within the pancreas and is 2 centimetres (cm) (about ¾ inch) or less across.

[0028] T2: The cancer is still within the pancreas but is larger than 2 cm across.

[0029] T3: The cancer has grown outside the pancreas into nearby surrounding tissues but not into major blood vessels or nerves.

[0030] T4: The cancer has grown beyond the pancreas into nearby large blood vessels or nerves.

[0031] N categories

[0032] NX: Nearby (regional) lymph nodes cannot be assessed.

[0033] N0: The cancer has not spread to nearby lymph nodes.

[0034] N1: The cancer has spread to nearby lymph nodes.

[0035] M categories

[0036] M0: The cancer has not spread to distant lymph nodes (other than those near the pancreas) or to distant organs such as the liver, lungs, brain, etc.

[0037] M1: The cancer has spread to distant lymph nodes or to distant organs.

[0038] Stage Grouping for Pancreatic Cancer

[0039] Once the T, N, and M categories have been determined, this information is combined to assign an overall stage of 0, I, II, III, or IV (sometimes followed by a letter). This process is called stage grouping.

[0040] Stage 0 (Tis, N0, M0): The tumor is confined to the top layers of pancreatic duct cells and has not invaded deeper tissues. It has not spread outside of the pancreas. These tumors are sometimes referred to as pancreatic carcinoma in situ or pancreatic intraepithelial neoplasia III (PanIn III).

[0041] Stage IA (T1, N0, M0): The tumor is confined to the pancreas and is 2 cm across or smaller (T1). It has not spread to nearby lymph nodes (N0) or distant sites (M0).

[0042] Stage IB (T2, N0, M0): The tumor is confined to the pancreas and is larger than 2 cm across (T2). It has not spread to nearby lymph nodes (N0) or distant sites (M0).

[0043] Stage IIA (T3, N0, M0): The tumor is growing outside the pancreas but not into major blood vessels or nerves (T3). It has not spread to nearby lymph nodes (N0) or distant sites (M0).

[0044] Stage IIB (T1-3, N1, M0): The tumor is either confined to the pancreas or growing outside the pancreas but not into major blood vessels or nerves (T1-T3). It has spread to nearby lymph nodes (N1) but not to distant sites (M0).

[0045] Stage III (T4, Any N, M0): The tumor is growing outside the pancreas into nearby major blood vessels or nerves (T4). It may or may not have spread to nearby lymph nodes (Any N). It has not spread to distant sites (M0).

[0046] Stage IV (Any T, Any N, M1): The cancer has spread to distant sites (M1).

[0047] Alternatively or additionally, by “early pancreatic cancer” we include or mean asymptomatic pancreatic cancer. Common presenting symptoms of pancreatic cancers include jaundice (for tumours of the pancreas head), abdominal pain, weight loss, steatorrhoea, and new-onset diabetes. For example, the pancreatic cancer may present at least 1 week before symptoms (e.g., common symptoms) are observed or observable, for example, ≥2 weeks, ≥3 weeks, ≥4 weeks, ≥5 weeks, ≥6 weeks, ≥7 weeks, ≥8 weeks, ≥3 months, ≥4 months, ≥5 months, ≥6 months, ≥7 months, ≥8 months, ≥9 months, ≥10 months, ≥11 months, ≥12 months, ≥18 months, ≥2 years, ≥3 years, ≥4 years, or ≥5 years, before symptoms are observed or observable.

[0048] Alternatively and/or additionally, by “early pancreatic cancer” we include pancreatic cancers that are of insufficient size and/or developmental stage to be diagnosed by conventional clinical methods.

[0049] Alternatively or additionally, by “early pancreatic cancer” we include or mean pancreatic cancers present at least 1 week before the pancreatic cancer is diagnosed or diagnosable by conventional clinical methods, for example, ≥2 weeks, ≥3 weeks, ≥4 weeks, ≥5 weeks, ≥6 weeks, ≥7 weeks, ≥8 weeks, ≥3 months, ≥4 months, ≥5 months, ≥6 months, ≥7 months, months, ≥9 months, ≥10 months, ≥11 months, ≥12 months, ≥18 months, ≥2 years, ≥3 years, ≥4 years, or ≥5 years, before the pancreatic cancer is diagnosed or diagnosable by convention clinical methods.

[0050] The contemporary best practice for clinical pancreatic cancer diagnosis will be well known to the person of skill in the art, however, for a detailed review see Ducreux et al., 2015, ‘Cancer of the pancreas: ESMO Clinical Practice Guidelines for diagnosis, treatment and follow-up’ Annals of Oncology, 26 (Supplement 5): v56-v68 which is incorporated by reference herein and can be obtained here:
[0051] https://annonc.oxfordjournals.org/content/26/suppl_5/v56.full.pdf+html.

[0052] Alternatively or additionally, by “conventional clinical diagnoses” (and the like [e.g., “diagnosed by conventional clinical methods”]) we include CT scan, ultrasound, endoscopic ultrasound, biopsy (histopathology) and/or physical examination (e.g., of the abdomen and, possibly, local lymph nodes). In one embodiment by “conventional clinical diagnoses” (and the like) we include the pancreatic cancer diagnosis procedures set out in Ducreux et al., 2015, ‘Cancer of the pancreas: ESMO Clinical Practice Guidelines for diagnosis, treatment and follow-up’ Annals of Oncology, 26 (Supplement 5): v56-v68, which is incorporated by reference herein.

[0053] Alternatively or additionally by “conventional clinical diagnoses” (and the like) may include or exclude the use of molecular biomarkers present in bodily fluids (such as blood, serum, interstitial fluid, lymph, urine, mucus, saliva, sputum, sweat) and or tissues.

[0054] Alternatively or additionally, by “early pancreatic cancer” we include or mean resectable pancreatic cancer.

[0055] By “resectable pancreatic cancer” we include or mean that the pancreatic cancer comprises or consists of tumours that are (and/or are considered) capable of being removed by surgery (i.e., are resectable).

[0056] Alternatively or additionally we include pancreatic cancers that are limited to the pancreas (i.e., do not extend beyond the pancreas and/or have not metastasised).

[0057] Alternatively or additionally by “early pancreatic cancer” we include pancreatic cancers comprising tumours of 30 mm or less in all dimensions (i.e., in this embodiment individuals with early pancreatic cancer do not comprise pancreatic cancer tumours of greater than 30 mm in any dimension), for example, equal to or less than 29 mm, 28 mm, 27 mm, 26 mm, 25 mm, 24 mm, 22 mm, 21 mm, 20 mm, 19 mm, 18 mm, 17 mm, 16 mm, 15 mm, 14 mm, 13 mm, 12 mm, 11 mm, 10 mm, 9 mm, 8 mm, 7 mm, 6 mm, 5 mm, 4 mm, 3 mm, 2 mm, 1 mm or equal to or 0.1 mm in all dimensions. Alternatively or additionally, the pancreatic cancer tumours of 30 mm or less in all dimensions are at least 2 mm in one dimension. Alternatively or additionally, the pancreatic cancer tumours of 30 mm or less in all dimensions are at least 2 mm all dimensions.

[0058] Alternatively or additionally, by “stage I pancreatic cancer” we include or mean AJCC stage IA and/or IB.

[0059] Alternatively or additionally, by “stage II pancreatic cancer” we include or mean AJCC stage IIA and/or IIB

[0060] Alternatively or additionally, by “late pancreatic cancer” we include or mean pancreatic cancer comprising or consisting of stage III and/or stage IV pancreatic cancer.

[0061] Alternatively or additionally, by “stage III pancreatic cancer” we include or mean AJCC stage III.

[0062] Alternatively or additionally, by “stage IV pancreatic cancer” we include or mean AJCC stage IV.

[0063] By a pancreatic cancer-associated disease state of “pancreatic cancer” we include pancreatic cancer comprising or consisting of pancreatic cancer of any stage.

[0064] By “sample to be tested”, “test sample” or “control sample” we include a tissue or fluid sample taken or derived from an individual. Preferably the sample to be tested is provided from a mammal. The mammal may be any domestic or farm animal. Preferably, the mammal is a rat, mouse, guinea pig, cat, dog, horse or a primate. Most preferably, the mammal is human.

[0065] Preferably the sample is a cell, tissue or fluid sample (or derivative thereof) comprising or consisting of blood (fractionated or unfractionated), plasma, plasma cells, serum, tissue cells or equally preferred, protein or nucleic acid derived from a cell or tissue sample. Preferably test and control samples are derived from the same species. Preferably test and control samples are matched for age, gender and/or lifestyle.

[0066] In an alternative or additional embodiment the tissue sample is pancreatic tissue. In an alternative or additional embodiment, the cell sample is a sample of pancreatic cells.

[0067] Alternatively or additionally the pancreatic cancer may be diagnosed using conventional clinical methods known in the art. For example, those methods described in Ducreux et al., 2015, ‘Cancer of the pancreas: ESMO Clinical Practice Guidelines for diagnosis, treatment and follow-up’ Annals of Oncology, 26 (Supplement 5): v56-v68 and/or Freelove & Walling, 2006, ‘Pancreatic Cancer: Diagnosis and Management’ American Family Physician, 73(3):485-492 which are incorporated herein by reference

[0068] Accordingly, the pancreatic cancer may be diagnosed using one or more method selected from the group consisting of:
[0069] computed tomography (preferably dual-phase helical computed tomography); transabdominal ultrasonography; endoscopic ultrasonographyguided fine-needle aspiration; endoscopic retrograde cholangiopancreatography; positron emission tomography; magnetic resonance imaging; physical examination; and biopsy.

[0070] Alternatively and/or additionally, the pancreatic cancer may be diagnosed using detection of biomarkers for the diagnosis of pancreatic cancer. For example, the pancreatic cancer may be diagnosed with one or more biomarker or diagnostic method described in the group consisting of: WO 2008/117067 A9; WO 2012/120288 A2; and WO 2015/067969 A2.

[0071] Alternatively or additionally, step (b) comprises or consists of measuring the presence and/or amount of 1 or more biomarker listed in Table A, for example at least 2, 3, 4, 5, 6, 7, 8, 9, 10, 11, 12, 13, 14, 15, 16, 17, 18, 19, 20, 21, 22, 23, 24, 25, 26, 27, 28, 29, 30, 31, 32, 33, 34, 35, 36, 37, 38, 39, 40, 41, 42, 43, 44, 45, 46, 47, 48, 49, 50, 51, 52, 53, 54, 55, 56, 57, 58, 59, 60, 61, 62, 63, 64, 65, 66, 67, 68, 69, 70, 71, 72, 73, 74, 75, 76, 77, 78, 79, 80, 81, 82, 83, 84 or 85 of the biomarkers listed in Table A.

[0072] Alternatively or additionally, step (b) comprises, consists of or excludes measuring the expression of CHP-1. Alternatively or additionally, step (b) comprises, consists of or excludes measuring the expression of MAPKK 2. Alternatively or additionally, step (b) comprises, consists of or excludes measuring the expression of MAPKK 6. Alternatively or additionally, step (b) comprises, consists of or excludes measuring the expression of R-PTP-O. Alternatively or additionally, step (b) comprises, consists of or excludes measuring the expression of UBP7. Alternatively or additionally, step (b) comprises, consists of or excludes measuring the expression of Apo-A1. Alternatively or additionally, step (b) comprises, consists of or excludes measuring the expression of BTK. Alternatively or additionally, step (b) comprises, consists of or excludes measuring the expression of C1q. Alternatively or additionally, step (b) comprises, consists of or excludes measuring the expression of C5. Alternatively or additionally, step (b) comprises, consists of or excludes measuring the expression of CDK-2. Alternatively or additionally, step (b) comprises, consists of or excludes measuring the expression of IgM. Alternatively or additionally, step (b) comprises, consists of or excludes measuring the expression of IL-11. Alternatively or additionally, step (b) comprises, consists of or excludes measuring the expression of IL-12. Alternatively or additionally, step (b) comprises, consists of or excludes measuring the expression of IL-6. Alternatively or additionally, step (b) comprises, consists of or excludes measuring the expression of JAK3. Alternatively or additionally, step (b) comprises, consists of or excludes measuring the expression of MAPK8. Alternatively or additionally, step (b) comprises, consists of or excludes measuring the expression of MCP-1. Alternatively or additionally, step (b) comprises, consists of or excludes measuring the expression of MUC-1. Alternatively or additionally, step (b) comprises, consists of or excludes measuring the expression of Properdin. Alternatively or additionally, step (b) comprises, consists of or excludes measuring the expression of VEGF. Alternatively or additionally, step (b) comprises, consists of or excludes measuring the expression of GRIP-2. Alternatively or additionally, step (b) comprises, consists of or excludes measuring the expression of MAPK9. Alternatively or additionally, step (b) comprises, consists of or excludes measuring the expression of PKB gamma. Alternatively or additionally, step (b) comprises, consists of or excludes measuring the expression of PRD14. Alternatively or additionally, step (b) comprises, consists of or excludes measuring the expression of R-PTP-eta. Alternatively or additionally, step (b) comprises, consists of or excludes measuring the expression of TopBP1. Alternatively or additionally, step (b) comprises, consists of or excludes measuring the expression of C3. Alternatively or additionally, step (b) comprises, consists of or excludes measuring the expression of CD40L. Alternatively or additionally, step (b) comprises, consists of or excludes measuring the expression of EGFR. Alternatively or additionally, step (b) comprises, consists of or excludes measuring the expression of HADH2. Alternatively or additionally, step (b) comprises, consists of or excludes measuring the expression of ICAM-1. Alternatively or additionally, step (b) comprises, consists of or excludes measuring the expression of IL-13. Alternatively or additionally, step (b) comprises, consists of or excludes measuring the expression of IL-18. Alternatively or additionally, step (b) comprises, consists of or excludes measuring the expression of Myomesin-2. Alternatively or additionally, step (b) comprises, consists of or excludes measuring the expression of P85A. Alternatively or additionally, step (b) comprises, consists of or excludes measuring the expression of RANTES. Alternatively or additionally, step (b) comprises, consists of or excludes measuring the expression of TGF-b1. Alternatively or additionally, step (b) comprises, consists of or excludes measuring the expression of IL-4. Alternatively or additionally, step (b) comprises, consists of or excludes measuring the expression of CIMS (13). Alternatively or additionally, step (b) comprises, consists of or excludes measuring the expression of GNAI3. Alternatively or additionally, step (b) comprises, consists of or excludes measuring the expression of HsMAD2. Alternatively or additionally, step (b) comprises, consists of or excludes measuring the expression of hSpindly. Alternatively or additionally, step (b) comprises, consists of or excludes measuring the expression of R-PTP-kappa. Alternatively or additionally, step (b) comprises, consists of or excludes measuring the expression of STAT1. Alternatively or additionally, step (b) comprises, consists of or excludes measuring the expression of ATP-5B. Alternatively or additionally, step (b) comprises, consists of or excludes measuring the expression of C4. Alternatively or additionally, step (b) comprises, consists of or excludes measuring the expression of CHX10. Alternatively or additionally, step (b) comprises, consists of or excludes measuring the expression of Factor B. Alternatively or additionally, step (b) comprises, consists of or excludes measuring the expression of Her2/ErbB-2. Alternatively or additionally, step (b) comprises, consists of or excludes measuring the expression of IL-1b. Alternatively or additionally, step (b) comprises, consists of or excludes measuring the expression of IL-7. Alternatively or additionally, step (b) comprises, consists of or excludes measuring the expression of Lewis X. Alternatively or additionally, step (b) comprises, consists of or excludes measuring the expression of MCP-3. Alternatively or additionally, step (b) comprises, consists of or excludes measuring the expression of Sialyl Lewis x. Alternatively or additionally, step (b) comprises, consists of or excludes measuring the expression of TBC1D9. Alternatively or additionally, step (b) comprises, consists of or excludes measuring the expression of TNFRSF3. Alternatively or additionally, step (b) comprises, consists of or excludes measuring the expression of AGAP-2. Alternatively or additionally, step (b) comprises, consists of or excludes measuring the expression of C1-INH. Alternatively or additionally, step (b) comprises, consists of or excludes measuring the expression of C1s. Alternatively or additionally, step (b) comprises, consists of or excludes measuring the expression of GLP-1 R. Alternatively or additionally, step (b) comprises, consists of or excludes measuring the expression of IL-2. Alternatively or additionally, step (b) comprises, consists of or excludes measuring the expression of KSYK. Alternatively or additionally, step (b) comprises, consists of or excludes measuring the expression of MAPK1. Alternatively or additionally, step (b) comprises, consists of or excludes measuring the expression of TENS4. Alternatively or additionally, step (b) comprises, consists of or excludes measuring the expression of FASN. Alternatively or additionally, step (b) comprises, consists of or excludes measuring the expression of IL-10. Alternatively or additionally, step (b) comprises, consists of or excludes measuring the expression of IL-3. Alternatively or additionally, step (b) comprises, consists of or excludes measuring the expression of IL-8. Alternatively or additionally, step (b) comprises, consists of or excludes measuring the expression of STAP2. Alternatively or additionally, step (b) comprises, consists of or excludes measuring the expression of CT17. Alternatively or additionally, step (b) comprises, consists of or excludes measuring the expression of Digoxin. Alternatively or additionally, step (b) comprises, consists of or excludes measuring the expression of HsHec1. Alternatively or additionally, step (b) comprises, consists of or excludes measuring the expression of PAR-6B. Alternatively or additionally, step (b) comprises, consists of or excludes measuring the expression of PGAM5. Alternatively or additionally, step (b) comprises, consists of or excludes measuring the expression of IFN-γ.

[0073] Alternatively or additionally, the pancreatic cancer-associated disease state is early pancreatic cancer.

[0074] Alternatively or additionally, the method is for the diagnosis and/or staging of stage I or stage II pancreatic cancer (i.e., diagnosing pancreatic cancer and/or characterising the pancreatic cancer as stage I or stage II without necessarily determining which). Alternatively or additionally, step (b) comprises or consists of measuring the presence and/or amount of 1 or more biomarker listed in:
[0075] Table A(I), for example at least 2, 3, 4 or 5 of the biomarkers listed in Table A(I);
[0076] Table A(III), for example at least 2, 3, 4, 5 or 6 of the biomarkers listed in Table A(III);
[0077] Table A(V), for example at least 2, 3, 4, 5 or 6 of the biomarkers listed in Table A(V); and
[0078] Table A(XI), for example at least 2 or 3 of the biomarkers listed in Table A(XI).

[0079] Alternatively or additionally, step (b) comprises or consists of measuring the presence and/or amount of 1 or more biomarker listed in:
[0080] Table A(II), for example at least 2, 3, 4, 5, 6, 7, 8, 9, 10, 11, 12, 13, 14 15 or 16 of the biomarkers listed in Table A(II);
[0081] Table A(IV), for example at least 2, 3, 4, 5, 6, 7, 8, 9, 10, 11 or 12 of the biomarkers listed in Table A(IV);
[0082] Table A(VI), for example at least 2, 3, 4, 5, 6, 7, 8, 9, 10, 11, 12 or 13 of the biomarkers listed in Table A(VI); and
[0083] Table A(XII), for example at least 2, 3, 4, 5 or 6 of the biomarkers listed in Table A(XII).

[0084] Alternatively or additionally, the method is for the diagnosis and/or staging of stage I pancreatic cancer (i.e., diagnosing pancreatic cancer and/or characterising the pancreatic cancer as stage I).

[0085] Alternatively or additionally, step (b) comprises or consists of measuring the presence and/or amount of 1 or more biomarker listed in:
[0086] Table A(I), for example at least 2, 3, 4 or 5 of the biomarkers listed in Table A(I);
[0087] Table A(III), for example at least 2, 3, 4, 5 or 6 of the biomarkers listed in Table A(III);
[0088] Table A(VII).

[0089] Alternatively or additionally, step (b) comprises or consists of measuring the presence and/or amount of 1 or more biomarker listed in:
[0090] Table A(II), for example at least 2, 3, 4, 5, 6, 7, 8, 9, 10, 11, 12, 13, 14, 15 or 16 of the biomarkers listed in Table A(II);
[0091] Table A(IV), for example at least 2, 3, 4, 5, 6, 7, 8, 9, 10, 11 or 12 of the biomarkers listed in Table A(IV); and
[0092] Table A(VIII), for example at least 2, 3, 4, 5 or 6 of the biomarkers listed in Table A(VIII).

[0093] Alternatively or additionally, the method is for the diagnosis and/or staging of stage II pancreatic cancer.

[0094] Alternatively or additionally, step (b) comprises or consists of measuring the presence and/or amount of 1 or more biomarker listed in:
[0095] Table A(I), for example at least 2, 3, 4 or 5 of the biomarkers listed in Table A(I);
[0096] Table A(V), for example at least 2, 3, 4, 5 or 6 of the biomarkers listed in Table A(V);
[0097] Table A(IX).

[0098] Alternatively or additionally, step (b) comprises or consists of measuring the presence and/or amount of 1 or more biomarker listed in:
[0099] Table A(II), for example at least 2, 3, 4, 5, 6, 7, 8, 9, 10, 11, 12, 13, 14, 15 or 16 of the biomarkers listed in Table A(II);
[0100] Table A(VI), for example at least 2, 3, 4, 5, 6, 7, 8, 9, 10, 11, 12 or 13 of the biomarkers listed in Table A(VI); and
[0101] Table A(X), for example at least 2, 3 or 4 of the biomarkers listed in Table A(X).

[0102] Alternatively or additionally, the method is for diagnosing or characterising stage III or IV pancreatic cancer (i.e., diagnosing pancreatic cancer and/or characterising the pancreatic cancer as stage III or IV), comprising or consisting of measuring the presence or amount of one or more biomarker for diagnosing or characterising stage I or II pancreatic cancer as defined above and measuring the presence or amount of one or more biomarker for diagnosing or characterising stage I-IV pancreatic cancer as defined above. Alternatively or additionally, one or more of the stage ‘I or II’ biomarkers is different from one or more of the ‘stage I-IV biomarkers’. Alternatively or additionally, all of the stage ‘I or II’ biomarkers is different from one or more of the ‘stage I-IV biomarkers’.

[0103] Alternatively or additionally, the pancreatic cancer-associated disease state is pancreatic cancer (i.e., the method is for diagnosing the presence of pancreatic cancer).

[0104] Alternatively or additionally, step (b) comprises or consists of measuring the presence and/or amount of 1 or more biomarker selected from the group consisting of CHP-1, MAPKK 2, UBP7, PRD14, STAT1, AGAP-2, PGAM5, LUM, PTPRO and USP07, for example, at least 2, 3, 4, 5, 6, 7, 8, 9 or 10 of these biomarkers.

[0105] Alternatively or additionally, step (b) comprises or consists of measuring the presence and/or amount of 1 or more biomarker selected from the group consisting of Apo-A1, BTK, C1q, C5, CDK-2, IgM, IL-11, IL-12, IL-6, JAK3, MAPK8, MCP-1, MUC-1, Properdin, VEGF, C3, ICAM-1, IL-13, ATP-5B, C4, Her2/ErB-2, IL-7, IL-3, IL-8, GM-CSF, IL-9, LDL and ORP3, for example, at least 2, 3, 4, 5, 6, 7, 8, 9, 10, 11, 12, 13, 14, 15, 16, 17, 18, 19, 20, 21, 22, 23, 24, 25, 26, 27, 28 or 29 of these biomarkers.

[0106] Alternatively or additionally, step (b) comprises measuring one or more of the biomarkers listed in FIG. 4, for example, at least 2, 3, 4, 5, 6, 7, 8, 9, 10, 11, 12, 13, 14, 15, 16, 17, 18, 19, 20, 21, 22, 23, 24, 25, 26, 27, 28, 29, 30 or 31 of the biomarkers listed in FIG. 4.

[0107] Alternatively or additionally, step (b) comprises measuring the presence and/or amount of all of the biomarkers listed in Table A.

[0108] Alternatively or additionally the method further comprises or consists of the steps of:
[0109] (c) providing one or more control sample from:
   [0110] (i) an individual not afflicted with pancreatic cancer; and/or
   [0111] (ii) an individual afflicted with pancreatic cancer, wherein the sample was of a different stage to that of that the test sample;
[0112] (d) determining a biomarker signature of the one or more control sample by measuring the presence and/or amount in the control sample of the one or more biomarkers measured in step (b);
[0113] wherein the pancreatic cancer-associated disease state is identified in the event that the presence and/or amount in the test sample of the one or more biomarkers measured in step (b) is different from the presence and/or amount in the control sample of the one or more biomarkers measured in step (d).

[0114] By “is different to the presence and/or amount in a control sample” we mean or include the presence and/or amount of the one or more biomarker in the test sample differs from that of the one or more control sample (or to predefined reference values representing the same). Preferably the presence and/or amount in the test sample differs from the presence or amount in the one or more control sample (or mean of the control samples) by at least ±5%, for example, at least ±6%, ±7%, ±8%, ±9%, ±10%, ±11%, ±12%, ±13%, ±14%, ±15%, ±16%, ±17%, ±18%, ±19%, ±20%, ±21%, ±22%, ±23%, ±24%, ±25%, ±26%, ±27%, ±28%, ±29%, ±30%, ±31%, ±32%, ±33%, ±34%, ±35%, ±36%, ±37%, ±38%, ±39%, ±40%, ±41%, ±42%, ±43%, ±44%, ±45%, ±41%, ±42%, ±43%, ±44%, ±55%, ±60%, ±65%, ±66%, ±67%, ±68%, ±69%, ±70%, ±71% , ±72%, ±73%, ±74%, ±75%, ±76%, ±77%, ±78%, ±79%, ±80%, ±81%, ±82%, ±83%, ±84%, ±85%, ±86%, ±87%, ±88%, ±89%, ±90%, ±91%, ±92%, ±93%, ±94%, ±95%, ±96%, ±97%, ±98%, ±99%, ±100%, ±125%, ±150%, ±175%, ±200%, ±225%, ±250%, ±275%, ±300%, ±350%, ±400%, ±500% or at least ±1000% of the one or more control sample (e.g., the negative control sample).

[0115] Alternatively or additionally, the presence or amount in the test sample differs from the mean presence or amount in the control samples by at least >1 standard deviation from the mean presence or amount in the control samples, for example, ≥1.5, ≥2, ≥3, ≥4, ≥5, ≥6, ≥7, ≥8, ≥9, ≥10, ≥11, ≥12, ≥13, ≥14 or ≥15 standard deviations from the from the mean presence or amount in the control samples. Any suitable means may be used for determining standard deviation (e.g., direct, sum of square, Welford's), however, in one embodiment, standard deviation is determined using the direct method (i.e., the square root of [the sum the squares of the samples minus the mean, divided by the number of samples]).

[0116] Alternatively or additionally, by “is different to the presence and/or amount in a control sample” we mean or include that the presence or amount in the test sample does not correlate with the amount in the control sample in a statistically significant manner. By “does not correlate with the amount in the control sample in a statistically significant manner” we mean or include that the presence or amount in the test sample correlates with that of the control sample with a p-value of >0.001, for example, >0.002, >0.003, >0.004, >0.005, >0.01, >0.02, >0.03, >0.04 >0.05, >0.06, >0.07, >0.08, >0.09 or >0.1. Any suitable means for determining p-value known to the skilled person can be used, including z-test, Mest, Student's t-test, f-test, Mann-Whitney U test, Wilcoxon signed-rank test and Pearson's chi-squared test.

[0117] Alternatively or additionally the method further comprises or consists of the steps of:
[0118] providing one or more control sample from;
   [0119] (e) an individual afflicted with pancreatic cancer (i.e., a positive control); and/or
   [0120] (f) an individual afflicted with pancreatic cancer, wherein the sample was of the same stage to that of that the test sample;
[0121] determining a biomarker signature of the control sample by measuring the presence and/or amount in the control sample of the one or more biomarkers measured in step (b);
[0122] wherein the pancreatic cancer-associated disease state is identified in the event that the presence and/or amount in the test sample of the one or more biomarkers measured in step (b) corresponds to the presence and/or amount in the control sample of the one or more biomarkers measured in step (f).

[0123] By “corresponds to the presence and/or amount in a control sample” we mean or include the presence and/or amount is identical to that of a positive control sample; or closer to that of one or more positive control sample than to one or more negative control sample (or to predefined reference values representing the same). Preferably the presence and/or amount is within ±40% of that of the one or more control sample (or mean of the control samples), for example, within ±39%, ±38%, ±37%, ±36%, ±35%, ±34%, ±33%, ±32%, ±31%, ±30%, ±29%, ±28%, ±27%, ±26%, ±25%, ±24%, ±23%, ±22%, ±21%, ±20%, ±19%, ±18%, ±17%, ±16%, ±15%, ±14%, ±13%, ±12%, ±11%, ±10%, ±9%, ±8%, ±7%, ±6%, ±5%, ±4%, ±3%, ±2%, ±1%, ±0.05% or within 0% of the one or more control sample (e.g., the positive control sample).

[0124] Alternatively or additionally, the difference in the presence or amount in the test sample is ≤5 standard deviation from the mean presence or amount in the control samples, for example, ≤4.5, ≤4, ≤3.5, ≤3, ≤2.5, ≤2, ≤1.5, ≤1.4, ≤1.3, ≤1.2, ≤1.1, ≤1, ≤0.9, ≤0.8, ≤0.7, ≤0.6, ≤0.5, ≤0.4, ≤0.3, ≤0.2, ≤0.1 or 0 standard deviations from the from the mean presence or amount in the control samples, provided that the standard deviation ranges for differing and corresponding biomarker expressions do not overlap (e.g., abut, but no not overlap).

[0125] Alternatively or additionally, by “corresponds to the presence and/or amount in a control sample” we mean or include that the presence or amount in the test sample correlates with the amount in the control sample in a statistically significant manner. By “correlates with the amount in the control sample in a statistically significant manner” we mean or include that the presence or amount in the test sample correlates with the that of the control sample with a p-value of ≤0.05, for example, ≤0.04, ≤0.03, ≤0.02, ≤0.01, ≤0.005, ≤0.004, ≤0.003, ≤0.002, ≤0.001, ≤0.0005 or ≤0.0001.

[0126] Differential expression (up-regulation or down regulation) of biomarkers, or lack thereof, can be determined by any suitable means known to a skilled person. Differential expression is determined to a p value of a least less than 0.05 (p=<0.05), for example, at least <0.04, <0.03, <0.02, <0.01, <0.009, <0.005, <0.001, <0.0001, <0.00001 or at least <0.000001. Alternatively or additionally, differential expression is determined using a support vector machine (SVM). Alternatively or additionally, the SVM is an SVM as described below. Most preferably, the SVM is, or is derived from, the SVM described in Table 5, below.

[0127] It will be appreciated by persons skilled in the art that differential expression may relate to a single biomarker or to multiple biomarkers considered in combination (i.e. as a biomarker signature). Thus, a p value may be associated with a single biomarker or with a group of biomarkers. Indeed, proteins having a differential expression p value of greater than 0.05 when considered individually may nevertheless still be useful as biomarkers in accordance with the invention when their expression levels are considered in combination with one or more other biomarkers.

[0128] As exemplified in the accompanying examples, the expression of certain proteins in a tissue, blood, serum or plasma test sample may be indicative of pancreatic cancer in an individual. For example, the relative expression of certain serum proteins in a single test sample may be indicative of the presence of pancreatic cancer in an individual.

[0129] In an alternative or additional embodiment the presence and/or amount in the test sample of the one or more biomarkers measured in step (b) are compared against predetermined reference values representative of the measurements in steps (d) and/or (f).

[0130] Alternatively or additionally, the individual from which the one or more control sample was obtained was not, at the time the sample was obtained, afflicted with a non-cancerous pancreatic disease or condition, for example acute pancreatitis, chronic pancreatitis and autoimmune pancreatitis, Intraductal Papillary Mucinous Neoplasia (IPMN) of the Pancreas.

[0131] Alternatively or additionally, the individual from which the one or more control sample was obtained was not, at the time the sample was obtained, afflicted with any disease or condition of the pancreas.

[0132] Alternatively or additionally, the individual not afflicted with pancreatic cancer was not, at the time the sample was obtained, afflicted with any disease or condition.

[0133] Alternatively or additionally, the individual not afflicted with pancreatic cancer is a healthy individual.

[0134] Alternatively or additionally, the one or more individual afflicted with pancreatic cancer is afflicted with a pancreatic cancer selected from the group consisting of adenocarcinoma (e.g., pancreatic ductal adenocarcinoma or tubular papillary pancreatic adenocarcinoma), pancreatic sarcoma, malignant serous cystadenoma, adenosquamous carcinoma, signet ring cell carcinoma, hepatoid carcinoma, colloid carcinoma, undifferentiated carcinoma, and undifferentiated carcinomas with osteoclast-like giant cells.

[0135] Alternatively or additionally, the pancreatic cancer is pancreatic adenocarcinoma (e.g., pancreatic ductal adenocarcinoma).

[0136] Alternatively or additionally, the one or more individual afflicted with pancreatic cancer is not afflicted with one or more pancreatic cancer selected from the group consisting of adenocarcinoma (e.g., pancreatic ductal adenocarcinoma or tubular papillary pancreatic adenocarcinoma), pancreatic sarcoma, malignant serous cystadenoma, adenosquamous carcinoma, signet ring cell carcinoma, hepatoid carcinoma, colloid carcinoma, undifferentiated carcinoma, and undifferentiated carcinomas with osteoclast-like giant cells.

[0137] Alternatively or additionally, the method is repeated.

[0138] Alternatively or additionally, the method is repeated and wherein, in step (a), the sample to be tested is taken at different time to the previous method repetition.

[0139] Alternatively or additionally, the method is repeated using a test sample taken at a different time period to the previous test sample(s) used.

[0140] Alternatively or additionally, the method is repeated using a test sample taken between 1 day to 104 weeks to the previous test sample(s) used, for example, between 1 week to 100 weeks, 1 week to 90 weeks, 1 week to 80 weeks, 1 week to 70 weeks, 1 week to 60 weeks, 1 week to 50 weeks, 1 week to 40 weeks, 1 week to 30 weeks, 1 week to 20 weeks, 1 week to 10 weeks, 1 week to 9 weeks,1 week to 8 weeks, 1 week to 7 weeks, 1 week to 6 weeks, 1 week to 5 weeks, 1 week to 4 weeks, 1 week to 3 weeks, or 1 week to 2 weeks.

[0141] Alternatively or additionally, the method is repeated using a test sample taken every period from the group consisting of: 1 day, 2 days, 3 day, 4 days, 5 days, 6 days, 7 days, 10 days, 2 weeks, 3 weeks, 4 weeks, 5 weeks, 6 weeks, 7 weeks, 8 weeks, 9 weeks, 10 weeks, 15 weeks, 20 weeks, 25 weeks, 30 weeks, 35 weeks, 40 weeks, 45 weeks, 50 weeks, 55 weeks, 60 weeks, 65 weeks, 70 weeks, 75 weeks, 80 weeks, 85 weeks, 90 weeks, 95 weeks, 100 weeks, 104, weeks, 105 weeks, 110 weeks, 115 weeks, 120 weeks, 125 weeks and 130 weeks.

[0142] Alternatively or additionally, the method is repeated at least once, for example, 2 times, 3 times, 4 times, 5 times, 6 times, 7 times, 8 times, 9 times, 10 times, 11 times, 12 times, 13 times, 14 times, 15 times, 16 times, 17 times, 18 times, 19 times, 20 times, 21 times, 22 times, 23, 24 times or 25 times.

[0143] Alternatively or additionally, the method is repeated continuously.

[0144] Alternatively or additionally, the method is repeated until pancreatic cancer is diagnosed and/or staged in the individual using the methods of the present invention and/or conventional clinical methods.

[0145] Alternatively or additionally, each repetition uses test sample taken from the same individual.

[0146] Alternatively or additionally, step (b) comprises measuring the expression of the protein or polypeptide of the one or more biomarker(s).

[0147] Alternatively or additionally, step (b), (d) and/or step (f) is performed using one or more first binding agent capable of binding to a biomarker listed in Table A. It will be appreciated by persons skilled in the art that the first binding agent may comprise or consist of a single species with specificity for one of the protein biomarkers or a plurality of different species, each with specificity for a different protein biomarker.

[0148] Suitable binding agents (also referred to as binding molecules) can be selected from a library, based on their ability to bind a given motif, as discussed below.

[0149] At least one type of the binding agents, and more typically all of the types, may comprise or consist of an antibody or antigen-binding fragment of the same, or a variant thereof.

[0150] Methods for the production and use of antibodies are well known in the art, for example see Antibodies: A Laboratory Manual, 1988, Harlow & Lane, Cold Spring Harbor Press, ISBN-13: 978-0879693145, Using Antibodies: A Laboratory Manual, 1998, Harlow & Lane, Cold Spring Harbor Press, ISBN-13: 978-0879695446 and Making and Using Antibodies: A Practical Handbook, 2006, Howard & Kaser, CRC Press, ISBN-13: 978-0849335280 (the disclosures of which are incorporated herein by reference).

[0151] Thus, a fragment may contain one or more of the variable heavy (V_{H}) or variable light (V_{L}) domains. For example, the term antibody fragment includes Fab-like molecules (Better et al (1988) Science 240, 1041); Fv molecules (Skerra et al (1988) Science 240, 1038); single-chain Fv (ScFv) molecules where the V_{H} and V_{L} partner domains are linked via a flexible oligopeptide (Bird et al (1988) Science 242, 423; Huston et al (1988) Proc. Natl. Acad. Sci. USA 85, 5879) and single domain antibodies (dAbs) comprising isolated V domains (Ward et al (1989) Nature 341, 544).

[0152] The term “antibody variant” includes any synthetic antibodies, recombinant antibodies or antibody hybrids, such as but not limited to, a single-chain antibody molecule produced by phage-display of immunoglobulin light and/or heavy chain variable and/or constant regions, or other immunointeractive molecule capable of binding to an antigen in an immunoassay format that is known to those skilled in the art.

[0153] A general review of the techniques involved in the synthesis of antibody fragments which retain their specific binding sites is to be found in Winter & Milstein (1991) Nature 349, 293-299.

[0154] Molecular libraries such as antibody libraries (Clackson et al, 1991, Nature 352, 624-628; Marks et al, 1991, J Mol Biol 222(3): 581-97), peptide libraries (Smith, 1985, Science 228(4705): 1315-7), expressed cDNA libraries (Santi et al (2000) J Mol Biol 296(2): 497-508), libraries on other scaffolds than the antibody framework such as affibodies (Gunneriusson et al, 1999, Appl Environ Microbiol 65(9): 4134-40) or libraries based on aptamers (Kenan et al, 1999, Methods Mol Biol 118, 217-31) may be used as a source from which binding molecules that are specific for a given motif are selected for use in the methods of the invention.

[0155] The molecular libraries may be expressed in vivo in prokaryotic (Clackson et al, 1991, op. cit.; Marks et al, 1991, op. cit.) or eukaryotic cells (Kieke et al, 1999, Proc Natl Acad Sci USA, 96(10):5651-6) or may be expressed in vitro without involvement of cells (Hanes & Pluckthun, 1997, Proc Natl Acad Sci USA 94(10):4937-42; He & Taussig, 1997, Nucleic Acids Res 25(24):5132-4; Nemoto et al, 1997, FEBS Lett, 414(2):405-8).

[0156] In cases when protein based libraries are used often the genes encoding the libraries of potential binding molecules are packaged in viruses and the potential binding molecule is displayed at the surface of the virus (Clackson et al, 1991, op. cit.; Marks et al, 1991, op. cit; Smith, 1985, op. cit.).

[0157] The most commonly used such system today is filamentous bacteriophage displaying antibody fragments at their surfaces, the antibody fragments being expressed as a fusion to the minor coat protein of the bacteriophage (Clackson et al, 1991, op. cit.; Marks et al, 1991, op. cit). However, also other systems for display using other viruses (EP 39578), bacteria (Gunneriusson et al, 1999, op. cit.; Daugherty et al, 1998, Protein Eng 11(9):825-32; Daugherty et al, 1999, Protein Eng 12(7):613-21), and yeast (Shusta et al, 1999, J Mol Biol 292(5):949-56) have been used.

[0158] In addition, display systems have been developed utilising linkage of the polypeptide product to its encoding mRNA in so called ribosome display systems (Hanes & Pluckthun, 1997, op. cit.; He & Taussig, 1997, op. cit.; Nemoto et al, 1997, op. cit.), or alternatively linkage of the polypeptide product to the encoding DNA (see U.S. Pat. No. 5,856,090 and WO 98/37186).

[0159] When potential binding molecules are selected from libraries one or a few selector peptides having defined motifs are usually employed. Amino acid residues that provide structure, decreasing flexibility in the peptide or charged, polar or hydrophobic side chains allowing interaction with the binding molecule may be used in the design of motifs for selector peptides.

[0160] For example:
[0161] (i) Proline may stabilise a peptide structure as its side chain is bound both to the alpha carbon as well as the nitrogen;
[0162] (ii) Phenylalanine, tyrosine and tryptophan have aromatic side chains and are highly hydrophobic, whereas leucine and isoleucine have aliphatic side chains and are also hydrophobic;
[0163] (iii) Lysine, arginine and histidine have basic side chains and will be positively charged at neutral pH, whereas aspartate and glutamate have acidic side chains and will be negatively charged at neutral pH;
[0164] (iv) Asparagine and glutamine are neutral at neutral pH but contain a amide group which may participate in hydrogen bonds;
[0165] (v) Serine, threonine and tyrosine side chains contain hydroxyl groups, which may participate in hydrogen bonds.

[0166] Typically, selection of binding agents may involve the use of array technologies and systems to analyse binding to spots corresponding to types of binding molecules.

[0167] In an alternative or additional embodiment, the first binding agent(s) is/are immobilised on a surface (e.g. on a multiwell plate or array).

[0168] The variable heavy (V_{H}) and variable light (V_{L}) domains of the antibody are involved in antigen recognition, a fact first recognised by early protease digestion experiments. Further confirmation was found by “humanisation” of rodent antibodies. Variable domains of rodent origin may be fused to constant domains of human origin such that the resultant antibody retains the antigenic specificity of the rodent parented antibody (Morrison et al (1984) Proc. Natl. Acad. Sci. USA 81, 6851-6855).

[0169] That antigenic specificity is conferred by variable domains and is independent of the constant domains is known from experiments involving the bacterial expression of antibody fragments, all containing one or more variable domains. These molecules include Fab-like molecules (Better et al (1988) Science 240, 1041); Fv molecules (Skerra et al (1988) Science 240, 1038); single-chain Fv (ScFv) molecules where the V_{H} and V_{L} partner domains are linked via a flexible oligopeptide (Bird et al (1988) Science 242, 423; Huston et al (1988) Proc. Natl. Acad. Sci. USA 85, 5879) and single domain antibodies (dAbs) comprising isolated V domains (Ward et al (1989) Nature 341, 544). A general review of the techniques involved in the synthesis of antibody fragments which retain their specific binding sites is to be found in Winter & Milstein (1991) Nature 349, 293-299.

[0170] By “ScFv molecules” we mean molecules wherein the V_{H} and V_{L} partner domains are linked via a flexible oligopeptide.

[0171] The advantages of using antibody fragments, rather than whole antibodies, are several-fold. The smaller size of the fragments may lead to improved pharmacological properties, such as better penetration of solid tissue. Effector functions of whole antibodies, such as complement binding, are removed. Fab, Fv, ScFv and dAb antibody fragments can all be expressed in and secreted from E. coli, thus allowing the facile production of large amounts of the said fragments.

[0172] Whole antibodies, and F(ab′)₂ fragments are “bivalent”. By “bivalent” we mean that the said antibodies and F(ab′)₂ fragments have two antigen combining sites. In contrast, Fab, Fv, ScFv and dAb fragments are monovalent, having only one antigen combining sites.

[0173] The antibodies may be monoclonal or polyclonal. Suitable monoclonal antibodies may be prepared by known techniques, for example those disclosed in “Monoclonal Antibodies: A manual of techniques”, H Zola (CRC Press, 1988) and in “Monoclonal Hybridoma Antibodies: Techniques and applications”, J G R Hurrell (CRC Press, 1982), both of which are incorporated herein by reference.

[0174] Alternatively or additionally, the first binding agent comprises or consists of an antibody or an antigen-binding fragment thereof.

[0175] Alternatively or additionally, the antibody or antigen-binding fragment thereof is a recombinant antibody or antigen-binding fragment thereof.

[0176] Alternatively or additionally, the antibody or antigen-binding fragment thereof is selected from the group consisting of: scFv; Fab; a binding domain of an immunoglobulin molecule.

[0177] Alternatively or additionally, antibody or antigen-binding fragment is capable of competing for binding to a biomarker specified in Table A with an antibody for that biomarker defined in Table 8.

[0178] By “capable of competing” for binding to a biomarker specified in Table A with an antibody molecule as defined herein (or a variant, fusion or derivative of said antibody or antigen-binding fragment, or a fusion of a said variant or derivative thereof, which retains the binding specificity for the required biomarker) we mean or include that,the tested antibody or antigen-binding fragment is capable of inhibiting or otherwise interfering, at least in part, with the binding of an antibody molecule as defined herein.

[0179] For example, the antibody or antigen-binding fragment may be capable of inhibiting the binding of an antibody molecule defined herein by at least 10%, for example at least 20%, 30%, 40%, 50%, 60%, 70%, 80%, 90%, 35% or even by 100%.

[0180] Competitive binding may be determined by methods well known to those skilled in the art, such as ELISA (as described herein) and/or SPR (as described in the accompanying Examples).

[0181] Alternatively or additionally, the antibody or antigen-binding fragment is an antibody defined in Table 8 or an antigen-binding fragment thereof, or a variant thereof.

[0182] Alternatively or additionally, the antibody the antibody or antigen-binding fragment comprises a VH and VL domain specified in Table 8, or a variant thereof.

[0183] By ‘variants’ of the antibody or antigen-binding fragment of the invention we include insertions, deletions and substitutions, either conservative or non-conservative. In particular we include variants of the sequence of the antibody or antigen-binding fragment where such variations do not substantially alter the activity of the antibody or antigen-binding fragment. In particular, we include variants of the antibody or antigen-binding fragment where such changes do not substantially alter the binding specificity for the respective biomarker specified in Table 8.

[0184] The polypeptide variant may have an amino acid sequence which has at least 70% identity with one or more of the amino acid sequences of the antibody or antigen-binding fragment of the invention as defined herein—for example, at least 75%, at least 80%, at least 90%, at least 95%, at least 96%, at least 97%, at least 98%, or at least 99% identity with one or more of the amino acid sequences of the antibody or antigen-binding fragment of the invention as defined herein.

[0185] The percent sequence identity between two polypeptides may be determined using suitable computer programs, for example the GAP program of the University of Wisconsin Genetic Computing Group and it will be appreciated that percent identity is calculated in relation to polypeptides whose sequences have been aligned optimally.

[0186] The alignment may alternatively be carried out using the Clustal W program (as described in Thompson et al., 1994, Nucl. Acid Res. 22:4673-4680, which is incorporated herein by reference).

[0187] The parameters used may be as follows:
[0188] Fast pair-wise alignment parameters: K-tuple(word) size; 1, window size; 5, gap penalty; 3, number of top diagonals; 5. Scoring method: x percent.
[0189] Multiple alignment parameters: gap open penalty; 10, gap extension penalty; 0.05.
[0190] Scoring matrix: BLOSUM.

[0191] Alternatively, the BESTFIT program may be used to determine local sequence alignments.

[0192] The antibodies may share CDRs (e.g., 1, 2, 3, 4 ,5 or 6) CDRs with one or more of the antibodies defined in Table 8.

[0193] CDRs can be defined using any suitable method known in the art. Commonly used methods include Paratome (Kunik, Ashkenazi and Ofran, 2012, ‘Paratome: an online tool for systematic identification of antigen-binding regions in antibodies based on sequence or structure’ Nucl. Acids Res., 40:W521-W524; http://www.ofranlab.org/paratome/), Kabat (Wu and Kabat, 1970, ‘An analysis of the sequences of the variable regions of Bence Jones proteins and myeloma light chains and their implications for antibody complementarity.’ J. Exp. Med., 132:211-250), Chothia (Chothia and Lesk, 1987 ‘Canonical structures for the hypervariable regions of immunoglobulins’ J. Mol. Biol., 196:901-917; Chothia et al., 1989 ‘Conformations of immunoglobulin hypervariable regions’ Nature, 342:877-883) and IMGT (Lefranc et al., 2003 ‘IMGT unique numbering for immunoglobulin and T cell receptor variable domains and Ig superfamily V-like domains. Dev. Comp. Immunol., 27:55-77; Lefranc et al., 2005 ‘IMGT unique numbering for immunoglobulin and T cell receptor constant domains and Ig superfamily C-like domains’ Dev. Comp. Immunol., 29:185-203; http://www.imgt.org). For example, the method used may be the IMGT method.

[0194] Alternatively or additionally, the first binding agent is immobilised on a surface (e.g., on a multiwell plate or array).

[0195] Alternatively or additionally, the one or more biomarkers in the test sample are labelled with a detectable moiety.

[0196] Alternatively or additionally, the one or more biomarkers in the control sample(s) are labelled with a detectable moiety.

[0197] By a “detectable moiety” we include the meaning that the moiety is one which may be detected and the relative amount and/or location of the moiety (for example, the location on an array) determined.

[0198] Suitable detectable moieties are well known in the art.

[0199] Thus, the detectable moiety may be a fluorescent and/or luminescent and/or chemiluminescent moiety which, when exposed to specific conditions, may be detected. For example, a fluorescent moiety may need to be exposed to radiation (i.e. light) at a specific wavelength and intensity to cause excitation of the fluorescent moiety, thereby enabling it to emit detectable fluorescence at a specific wavelength that may be detected.

[0200] Alternatively, the detectable moiety may be an enzyme which is capable of converting a (preferably undetectable) substrate into a detectable product that can be visualised and/or detected. Examples of suitable enzymes are discussed in more detail below in relation to, for example, ELISA assays.

[0201] Alternatively, the detectable moiety may be a radioactive atom which is useful in imaging. Suitable radioactive atoms include ^{99m}Tc and ¹²³I for scintigraphic studies. Other readily detectable moieties include, for example, spin labels for magnetic resonance imaging (MRI) such as ¹²³I again, ¹³¹I, ¹¹¹In, ¹⁹F, ¹³C, ¹⁵N, ¹⁷O, gadolinium, manganese or iron. Clearly, the agent to be detected (such as, for example, the one or more biomarkers in the test sample and/or control sample described herein and/or an antibody molecule for use in detecting a selected protein) must have sufficient of the appropriate atomic isotopes in order for the detectable moiety to be readily detectable.

[0202] The radio- or other labels may be incorporated into the agents of the invention (i.e. the proteins present in the samples of the methods of the invention and/or the binding agents of the invention) in known ways. For example, if the binding moiety is a polypeptide it may lo be biosynthesised or may be synthesised by chemical amino acid synthesis using suitable amino acid precursors involving, for example, fluorine-19 in place of hydrogen. Labels such as ^{99m}Tc, ¹²³I, ¹⁸⁶Rh, ¹⁸⁸Rh and ¹¹¹In can, for example, be attached via cysteine residues in the binding moiety. Yttrium-90 can be attached via a lysine residue. The IODOGEN method (Fraker et al (1978) Biochem. Biophys. Res. Comm. 80, 49-57) can be used to incorporate ¹²³I. Reference (“Monoclonal Antibodies in Immunoscintigraphy”, J-F Chatal, CRC Press, 1989) describes other methods in detail. Methods for conjugating other detectable moieties (such as enzymatic, fluorescent, luminescent, chemiluminescent or radioactive moieties) to proteins are well known in the art.

[0203] Preferably, the one or more biomarkers in the control sample(s) are labelled with a detectable moiety. The detectable moiety may be selected from the group consisting of: a fluorescent moiety; a luminescent moiety; a chemiluminescent moiety; a radioactive moiety; an enzymatic moiety. However, it is preferred that the detectable moiety is biotin.

[0204] Alternatively or additionally, the detectable moiety is selected from the group consisting of: a fluorescent moiety; a luminescent moiety; a chemiluminescent moiety; a radioactive moiety; an enzymatic moiety.

[0205] Alternatively or additionally, the detectable moiety is biotin.

[0206] Alternatively or additionally, step (b), (d) and/or step (f) is performed using an assay comprising a second binding agent capable of binding to the one or more biomarkers, the second binding agent comprising a detectable moiety.

[0207] Alternatively or additionally, the second binding agent comprises or consists of an antibody or an antigen-binding fragment thereof.

[0208] Alternatively or additionally, the antibody or antigen-binding fragment thereof is a recombinant antibody or antigen-binding fragment thereof.

[0209] Alternatively or additionally, the antibody or antigen-binding fragment thereof is selected from the group consisting of: scFv; Fab; a binding domain of an immunoglobulin molecule.

[0210] Alternatively or additionally, the detectable moiety is selected from the group consisting of: a fluorescent moiety; a luminescent moiety; a chemiluminescent moiety; a radioactive moiety; an enzymatic moiety.

[0211] Alternatively or additionally, the detectable moiety is fluorescent moiety (for example an Alexa Fluor dye, e.g. Alexa647).

[0212] Alternatively or additionally, the detection method comprises or consists of an ELISA (Enzyme Linked Immunosorbent Assay).

[0213] Preferred assays for detecting serum or plasma proteins include enzyme linked immunosorbent assays (ELISA), radioimmunoassay (RIA), immunoradiometric assays (IRMA) and immunoenzymatic assays (IEMA), including sandwich assays using monoclonal and/or polyclonal antibodies. Exemplary sandwich assays are described by David et al in U.S. Pat. Nos. 4,376,110 and 4,486,530, hereby incorporated by reference. Antibody staining of cells on slides may be used in methods well known in cytology laboratory diagnostic tests, as well known to those skilled in the art.

[0214] Typically, the assay is an ELISA (Enzyme Linked Immunosorbent Assay) which typically involves the use of enzymes giving a coloured reaction product, usually in solid phase assays. Enzymes such as horseradish peroxidase and phosphatase have been widely employed. A way of amplifying the phosphatase reaction is to use NADP as a substrate to generate NAD which now acts as a coenzyme for a second enzyme system. Pyrophosphatase from Escherichia coli provides a good conjugate because the enzyme is not present in tissues, is stable and gives a good reaction colour. Chemi-luminescent systems based on enzymes such as luciferase can also be used.

[0215] ELISA methods are well known in the art, for example see The ELISA Guidebook (Methods in Molecular Biology), 2000, Crowther, Humana Press, ISBN-13: 978-0896037281 (the disclosures of which are incorporated by reference).

[0216] Conjugation with the vitamin biotin is frequently used since this can readily be detected by its reaction with enzyme-linked avidin or streptavidin to which it binds with great specificity and affinity.

[0217] Alternatively or additionally, step (b), (d) and/or step (f) is performed using an array.

[0218] Arrays per se are well known in the art. Typically they are formed of a linear or two-dimensional structure having spaced apart (i.e. discrete) regions (“spots”), each having a finite area, formed on the surface of a solid support. An array can also be a bead structure where each bead can be identified by a molecular code or colour code or identified in a continuous flow. Analysis can also be performed sequentially where the sample is passed over a series of spots each adsorbing the class of molecules from the solution. The solid support is typically glass or a polymer, the most commonly used polymers being cellulose, polyacrylamide, nylon, polystyrene, polyvinyl chloride or polypropylene. The solid supports may be in the form of tubes, beads, discs, silicon chips, microplates, polyvinylidene difluoride (PVDF) membrane, nitrocellulose membrane, nylon membrane, other porous membrane, non-porous membrane (e.g. plastic, polymer, perspex, silicon, amongst others), a plurality of polymeric pins, or a plurality of microtitre wells, or any other surface suitable for immobilising proteins, polynucleotides and other suitable molecules and/or conducting an immunoassay. The binding processes are well known in the art and generally consist of cross-linking covalently binding or physically adsorbing a protein molecule, polynucleotide or the like to the solid support. By using well-known techniques, such as contact or non-contact printing, masking or photolithography, the location of each spot can be defined. For reviews see Jenkins, R. E., Pennington, S. R. (2001, Proteomics, 2, 13-29) and Lal et al (2002, Drug Discov Today 15;7(18 Suppl):S143-9).

[0219] Typically the array is a microarray. By “microarray” we include the meaning of an array of regions having a density of discrete regions of at least about 100/cm², and preferably at least about 1000/cm². The regions in a microarray have typical dimensions, e.g., diameters, in the range of between about 10-250 μm, and are separated from other regions in the array by about the same distance. The array may also be a macroarray or a nanoarray.

[0220] Once suitable binding molecules (discussed above) have been identified and isolated, the skilled person can manufacture an array using methods well known in the art of molecular biology.

[0221] Alternatively or additionally, the array is a bead-based array.

[0222] Alternatively or additionally, the array is a surface-based array.

[0223] Alternatively or additionally, the array is selected from the group consisting of: macroarray; microarray; nanoarray.

[0224] Alternatively or additionally, the method comprises:
[0225] (i) labelling biomarkers present in the sample with biotin;
[0226] (ii) contacting the biotin-labelled proteins with an array comprising a plurality of scFv immobilised at discrete locations on its surface, the scFv having specificity for one or more of the proteins in Table A;
[0227] (iii) contacting the immobilised scFv with a streptavidin conjugate comprising a fluorescent dye; and
[0228] (iv) detecting the presence of the dye at discrete locations on the array surface
[0229] wherein the expression of the dye on the array surface is indicative of the expression of a biomarker from Table III in the sample.

[0230] Alternatively or additionally, step (b), (d) and/or (f) comprises measuring the expression of a nucleic acid molecule encoding the one or more biomarkers.

[0231] Alternatively or additionally, the nucleic acid molecule is a cDNA molecule or an mRNA molecule.

[0232] Alternatively or additionally, the nucleic acid molecule is an mRNA molecule.

[0233] Alternatively or additionally, measuring the expression of the one or more biomarker(s) in step (b), (d) and/or (f) is performed using a method selected from the group consisting of Southern hybridisation, Northern hybridisation, polymerase chain reaction (PCR), reverse transcriptase PCR (RT-PCR), quantitative real-time PCR (qRT-PCR), nanoarray, microarray, macroarray, autoradiography and in situ hybridisation.

[0234] Alternatively or additionally, measuring the expression of the one or more biomarker(s) in step (b) is determined using a DNA microarray.

[0235] Alternatively or additionally, measuring the expression of the one or more biomarker(s) in step (b), (d) and/or (f) is performed using one or more binding moieties, each individually capable of binding selectively to a nucleic acid molecule encoding one of the biomarkers identified in Table A.

[0236] Alternatively or additionally, the one or more binding moieties each comprise or consist of a nucleic acid molecule.

[0237] Alternatively or additionally, the one or more binding moieties each comprise or consist of DNA, RNA, PNA, LNA, GNA, TNA or PMO.

[0238] Alternatively or additionally, the one or more binding moieties each comprise or consist of DNA.

[0239] Alternatively or additionally, the one or more binding moieties are 5 to 100 nucleotides in length.

[0240] Alternatively or additionally, the one or more nucleic acid molecules are 15 to 35 nucleotides in length.

[0241] Alternatively or additionally, the binding moiety comprises a detectable moiety.

[0242] Alternatively or additionally, the detectable moiety is selected from the group consisting of: a fluorescent moiety; a luminescent moiety; a chemiluminescent moiety; a radioactive moiety (for example, a radioactive atom); or an enzymatic moiety.

[0243] Alternatively or additionally, the detectable moiety comprises or consists of a radioactive atom.

[0244] Alternatively or additionally, the radioactive atom is selected from the group consisting of technetium-99m, iodine-123, iodine-125, iodine-131, indium-111, fluorine-19, carbon-13, nitrogen-15, oxygen-17, phosphorus-32, sulphur-35, deuterium, tritium, rhenium-186, rhenium-188 and yttrium-90.

[0245] Alternatively or additionally, the detectable moiety of the binding moiety is a fluorescent moiety.

[0246] Alternatively or additionally, the sample provided in step (a), (c) and/or (e) is selected from the group consisting of unfractionated blood, plasma, serum, tissue fluid, pancreatic tissue, milk, bile and urine.

[0247] Alternatively or additionally, the sample provided in step (a), (c) and/or (e) is selected from the group consisting of unfractionated blood, plasma and serum.

[0248] Alternatively or additionally, the sample provided in step (a), (c) and/or (e) is serum.

[0249] Alternatively or additionally, the predicative accuracy of the method, as determined by an ROC AUC value, is at least 0.50, for example at least 0.55, 0.60, 0.65, 0.70, 0.75, 0.80, 0.85, 0.90, 0.95, 0.96, 0.97, 0.98 or at least 0.99.

[0250] Alternatively or additionally, the predicative accuracy of the method, as determined by an ROC AUC value, is at least 0.70.

[0251] Typically, diagnosis is performed using a support vector machine (SVM), such as those available from http://cran.r-project.org/web/packages/e1071/index.html (e.g. e1071 1.5-24). However, any other suitable means may also be used.

[0252] Support vector machines (SVMs) are a set of related supervised learning methods used for classification and regression. Given a set of training examples, each marked as belonging to one of two categories, an SVM training algorithm builds a model that predicts whether a new example falls into one category or the other. Intuitively, an SVM model is a representation of the examples as points in space, mapped so that the examples of the separate categories are divided by a clear gap that is as wide as possible. New examples are then mapped into that same space and predicted to belong to a category based on which side of the gap they fall on.

[0253] More formally, a support vector machine constructs a hyperplane or set of hyperplanes in a high or infinite dimensional space, which can be used for classification, regression or other tasks. Intuitively, a good separation is achieved by the hyperplane that has the largest distance to the nearest training datapoints of any class (so-called functional margin), since in general the larger the margin the lower the generalization error of the classifier. For more information on SVMs, see for example, Burges, 1998, Data Mining and Knowledge Discovery, 2:121-167.

[0254] In an alternative or additional embodiment of the invention, the SVM is ‘trained’ prior to performing the methods of the invention using biomarker profiles from individuals with known disease status (for example, individuals known to have pancreatic cancer, individuals known to have acute inflammatory pancreatitis, individuals known to have chronic pancreatitis or individuals known to be healthy). By running such training samples, the SVM is able to learn what biomarker profiles are associated with pancreatic cancer. Once the training process is complete, the SVM is then able whether or not the biomarker sample tested is from an individual with pancreatic cancer.

[0255] However, this training procedure can be by-passed by pre-programming the SVM with the necessary training parameters. For example, diagnoses can be performed according to the known SVM parameters using the SVM algorithm detailed in Table 5, based on the measurement of any or all of the biomarkers listed in Table A.

[0256] It will be appreciated by skilled persons that suitable SVM parameters can be determined for any combination of the biomarkers listed in Table A by training an SVM machine with the appropriate selection of data (i.e. biomarker measurements from individuals with known pancreatic cancer status). Alternatively, the data of the Examples and figures may be used to determine a particular pancreatic cancer-associated disease state according to any other suitable statistical method known in the art.

[0257] Preferably, the method of the invention has an accuracy of at least 60%, for example 61%, 62%, 63%, 64%, 65%, 66%, 67%, 68%, 69%, 70%, 71%, 72%, 73%, 74%, 75%, 76%, 77%, 78%, 79%, 80%, 81%, 82%, 83%, 84%, 85%, 86%, 87%, 88%, 89%, 90%, 91%, 92%, 93%, 94%, 95%, 96%, 97%, 98%, 99% or 100% accuracy.

[0258] Preferably, the method of the invention has a sensitivity of at least 60%, for example 61%, 62%, 63%, 64%, 65%, 66%, 67%, 68%, 69%, 70%, 71%, 72%, 73%, 74%, 75%, 76%, 77%, 78%, 79%, 80%, 81%, 82%, 83%, 84%, 85%, 86%, 87%, 88%, 89%, 90%, 91%, 92%, 93%, 94%, 95%, 96%, 97%, 98%, 99% or 100% sensitivity.

[0259] Preferably, the method of the invention has a specificity of at least 60%, for example 61%, 62%, 63%, 64%, 65%, 66%, 67%, 68%, 69%, 70%, 71%, 72%, 73%, 74%, 75%, 76%, 77%, 78%, 79%, 80%, 81%, 82%, 83%, 84%, 85%, 86%, 87%, 88%, 89%, 90%, 91%, 92%, 93%, 94%, 95%, 96%, 97%, 98%, 99% or 100% specificity.

[0260] By “accuracy” we mean the proportion of correct outcomes of a method, by “sensitivity” we mean the proportion of all PaC positive sample that are correctly classified as positives, and by “specificity” we mean the proportion of all PaC negative samples that are correctly classified as negatives.

[0261] Signal intensities may be quantified using any suitable means known to the skilled person. Alternatively or additionally, signal intensities are quantified using the ScanArray Express software version 4.0. Signal intensity data may be normalised (i.e., to adjust technical variation). Normalisation may be performed using any suitable method known to the skilled person. Alternatively or additionally, data is normalised using the empirical Bayes algorithm ComBat (Johnson et al., 2007).

[0262] Alternatively or additionally, the individual(s) being tested is genotypically Lewis a-b-.

[0263] The individual(s) tested may be of any ethnicity. Alternatively or additionally, the individual(s) tested are Caucasian and/or Chinese (e.g., Han ethnicity).

[0264] Alternatively or additionally, the sample(s) provided in step (a), (c) and/or (e) are provided before treatment of the pancreatic cancer (e.g., resection, chemotherapy, radiotherapy).

[0265] Alternatively or additionally, the individual(s) being tested suffers from one or more condition selected from the group consisting of chronic pancreatitis, hereditary pancreatic ductal adenocarcinoma and Peutz-Jeghers syndrome.

[0266] In an alternative or additional embodiment the pancreatic cancer is selected from the group consisting of adenocarcinoma, adenosquamous carcinoma, signet ring cell carcinoma, hepatoid carcinoma, colloid carcinoma, undifferentiated carcinoma, and undifferentiated carcinomas with osteoclast-like giant cells. Preferably, the pancreatic cancer is a pancreatic adenocarcinoma. More preferably, the pancreatic cancer is pancreatic ductal adenocarcinoma, also known as exocrine pancreatic cancer.

[0267] Alternatively or additionally, the method comprises the active step of determining the presence or absence of the/a pancreatic cancer-associated disease state of the invention.

[0268] Alternatively or additionally, in the event that the individual is diagnosed with pancreatic cancer, the method comprises the step of:
[0269] (g) providing the individual with pancreatic cancer therapy.

[0270] Thus, a related aspect of the invention provides a method of treatment of an individual with a pancreatic cancer comprising the following steps:
[0271] (a) diagnosing an individual as having a pancreatic cancer using a method according to the first aspect of the invention; and
[0272] (b) treating the individual so diagnosed with a pancreatic cancer therapy (for example, see Thota et al., 2014, Oncology 28(1):70-4, the disclosures of which are incorporated herein by reference).

[0273] Alternatively or additionally, the pancreatic cancer therapy is selected from the group consisting of surgery, chemotherapy, immunotherapy, chemoimmunotherapy and thermochemotherapy.

[0274] In an alternative or additional embodiment the pancreatic cancer therapy is selected from the group consisting of surgery, chemotherapy, immunotherapy, chemoimmunotherapy and thermochemotherapy (e.g., AC chemotherapy; Capecitabine and docetaxel chemotherapy (Taxotere®); CMF chemotherapy; Cyclophosphamide; EC chemotherapy; ECF chemotherapy; E-CMF chemotherapy (Epi-CMF); Eribulin (Halaven®); FEC chemotherapy; FEC-T chemotherapy; Fluorouracil (5FU); GemCarbo chemotherapy; Gemcitabine (Gemzar®); Gemcitabine and cisplatin chemotherapy (GemCis or GemCisplat); GemTaxol chemotherapy; Idarubicin (Zavedos®); Liposomal doxorubicin (DaunoXome®); Mitomycin (Mitomycin C Kyowa®); Mitoxantrone; MM chemotherapy; MMM chemotherapy; Paclitaxel (Taxol®); TAC chemotherapy; Taxotere and cyclophosphamide (TC) chemotherapy; Vinblastine (Velbe®); Vincristine (Oncovin®); Vindesine (Eldisine®); and Vinorelbine (Navelbine®)).

[0275] Accordingly, the present invention comprises an antineoplastic agent for use in treating pancreatic cancer wherein the dosage regime is determined based on the results of the method of the first aspect of the invention.

[0276] The present invention comprises the use of an antineoplastic agent in treating pancreatic cancer wherein the dosage regime is determined based on the results of the method of the first aspect of the invention.

[0277] The present invention comprises the use of an antineoplastic agent in the manufacture of a medicament for treating pancreatic cancer wherein the dosage regime is determined based on the results of the method of the first aspect of the invention.

[0278] The present invention comprises a method of treating pancreatic cancer comprising providing a sufficient amount of an antineoplastic agent wherein the amount of antineoplastic agent sufficient to treat the pancreatic cancer is determined based on the results of the method of the first aspect of the invention.

[0279] In one embodiment, the antineoplastic agent comprises or consists of an alkylating agent (ATC code L01a), an antimetabolite (ATC code L01b), a plant alkaloid or other natural product (ATC code L01c), a cytotoxic antibiotic or a related substance (ATC code L01d), or another antineoplastic agents (ATC code L01x).

[0280] Hence, in one embodiment the antineoplastic agent comprises or consists of an alkylating agent selected from the group consisting of a nitrogen mustard analogue (for example cyclophosphamide, chlorambucil, melphalan, chlormethine, ifosfamide, trofosfamide, prednimustine or bendamustine) an alkyl sulfonate (for example busulfan, treosulfan, or mannosulfan) an ethylene imine (for example thiotepa, triaziquone or carboquone) a nitrosourea (for example carmustine, lomustine, semustine, streptozocin, fotemustine, nimustine or ranimustine) an epoxides (for example etoglucid) or another alkylating agent (ATC code L01ax, for example mitobronitol, pipobroman, temozolomide or dacarbazine).

[0281] In a another embodiment the antineoplastic agent comprises or consists of an antimetabolite selected from the group consisting of a folic acid analogue (for example methotrexate, raltitrexed, pemetrexed or pralatrexate), a purine analogue (for example mercaptopurine, tioguanine, cladribine, fludarabine, clofarabine or nelarabine) or a pyrimidine analogue (for example cytarabine, fluorouracil (5-FU), tegafur, carmofur, gemcitabine, capecitabine, azacitidine or decitabine).

[0282] In a still further embodiment the antineoplastic agent comprises or consists of a plant alkaloid or other natural product selected from the group consisting of a vinca alkaloid or a vinca alkaloid analogue (for example vinblastine, vincristine, vindesine, vinorelbine or vinflunine), a podophyllotoxin derivative (for example etoposide or teniposide) a colchicine derivative (for example demecolcine), a taxane (for example paclitaxel, docetaxel or paclitaxel poliglumex) or another plant alkaloids or natural product (ATC code L01cx, for example trabectedin).

[0283] In one embodiment the antineoplastic agent comprises or consists of a cytotoxic antibiotic or related substance selected from the group consisting of an actinomycine (for example dactinomycin), an anthracycline or related substance (for example doxorubicin, daunorubicin, epirubicin, aclarubicin, zorubicin, idarubicin, mitoxantrone, pirarubicin, valrubicin, amrubicin or pixantrone) or another (ATC code L01dc, for example bleomycin, plicamycin, mitomycin or ixabepilone).

[0284] In a further embodiment the antineoplastic agent comprises or consists of another antineoplastic agent selected from the group consisting of a platinum compound (for example cisplatin, carboplatin, oxaliplatin, satraplatin or polyplatillen) a methylhydrazine (for example procarbazine) a monoclonal antibody (for example edrecolomab, rituximab, trastuzumab, alemtuzumab, gemtuzumab, cetuximab, bevacizumab, panitumumab, catumaxomab or ofatumumab) a sensitizer used in photodynamic/radiation therapy (for example porfimer sodium, methyl aminolevulinate, aminolevulinic acid, temoporfin or efaproxiral) or a protein kinase inhibitor (for example imatinib, gefitinib, erlotinib, sunitinib, sorafenib, dasatinib, lapatinib, nilotinib, temsirolimus, everolimus, pazopanib, vandetanib, afatinib, masitinib or toceranib).

[0285] In a still further embodiment the antineoplastic agent comprises or consists of another neoplastic agent selected from the group consisting of amsacrine, asparaginase, altretamine, hydroxycarbamide, lonidamine, pentostatin, miltefosine, masoprocol, estramustine, tretinoin, mitoguazone, topotecan, tiazofurine, irinotecan (camptosar), alitretinoin, mitotane, pegaspargase, bexarotene, arsenic trioxide, denileukin diftitox, bortezomib, celecoxib, anagrelide, oblimersen, sitimagene ceradenovec, vorinostat, romidepsin, omacetaxine mepesuccinate, eribulin or folinic acid.

[0286] In one embodiment the antineoplastic agent comprises or consists of a combination of one or more antineoplastic agent, for example, one or more antineoplastic agent defined herein. One example of a combination therapy used in the treatment of pancreatic cancer is FOLFIRINOX which is made up of the following four drugs:
[0287] FOL—folinic acid (leucovorin);
[0288] F—fluorouracil (5-FU);
[0289] IRIN—irinotecan (Camptosar); and
[0290] OX—oxaliplatin (Eloxatin).

[0291] Accordingly, a second aspect of the invention provides an array for diagnosing or determining a pancreatic cancer-associated disease state in an individual comprising one or more binding agent as defined in the first aspect of the invention.

[0292] Alternatively or additionally, the one or more binding agents is capable of binding to all of the proteins defined in Table A.

[0293] A third aspect of the invention provides use of one or more biomarkers selected from the group defined in Table A as a biomarker for determining a pancreatic cancer associated disease states in an individual.

[0294] Alternatively or additionally, all of the proteins defined in Table A is used as a marker for determining a pancreatic cancer associated disease state in an individual.

[0295] A fourth aspect of the invention provides the use of one or more binding moiety as defined in the first aspect of the invention for determining a pancreatic cancer associated disease state in an individual.

[0296] Alternatively or additionally, biomarkers for all of the proteins defined in Table A are used.

[0297] A fifth aspect of the invention provides a kit for diagnosing or determining a pancreatic cancer-associated disease state in an individual comprising:
[0298] (a) one or more binding agent as defined in the first aspect of the invention or an array according to the second aspect of the invention;
[0299] (b) instructions for performing the method as defined above (e.g., in the first aspect of the invention).

[0300] A sixth aspect of the invention provides a method of treating pancreatic cancer in an individual comprising the steps of:
[0301] (a) determining a pancreatic cancer associated disease state according to the method defined in any the first aspect of the invention; and
[0302] (b) providing the individual with pancreatic cancer therapy.

[0303] Alternatively or additionally, the pancreatic cancer therapy is selected from the group consisting of surgery (e.g., resection), chemotherapy, immunotherapy, chemoimmunotherapy and thermochemotherapy.

[0304] An eighth aspect of the invention provides a computer program for operating the methods the invention, for example, for interpreting the expression data of step (c) (and subsequent expression measurement steps) and thereby diagnosing or determining a pancreatic cancer-associated disease state. The computer program may be a programmed SVM. The computer program may be recorded on a suitable computer-readable carrier known to persons skilled in the art. Suitable computer-readable-carriers may include compact discs (including CD-ROMs, DVDs, Blue Rays and the like), floppy discs, flash memory drives, ROM or hard disc drives. The computer program may be installed on a computer suitable for executing the computer program.

[0305] Preferred, non-limiting examples which embody certain aspects of the invention will now be described, with reference to the following tables and figures:

[0306] FIG. 1. Discrimination of pancreatic cancer (PDAC) vs. normal controls (NC).

[0307] (A) Principal component analysis (PCA) of PDAC (grey) and NC (black). The data was filtered to q<0.1 using ANOVA; (B) Relative protein levels corresponding to the 11 antibodies that remained after filtering, in a PCA plot synchronized to the one in A). Grey=up-regulated levels, Black=down-regulated levels in PDAC vs. NC; (C) ROC-curve with AUC of 0.88 from support vector machine analysis (SVM) with leave-one-out (LOO) cross-validation of PDAC vs. NC based on unfiltered data (using unfiltered data from all antibodies).

[0308] FIG. 2. Identification of plasma protein signatures for PDAC.

[0309] A training set and a test set was generated by randomized selection of ⅔ of samples from each group (PDAC and NC) to the training set, and the remaining ⅓ of samples to the test set. The training set was used to define a condensed signature for discriminating PDAC from NC. (A) Filtering of variables was conducted by a SVM-based stepwise backward elimination of the antibodies in the training set. In each iterative step, the Kullback-Liebler (K-L) error of the classification was determined and plotted. The antibodies that remained in the elimination process when the classification error reached its minimum value were used as a unique signature for constructing a new model in the training set; (B) ROC-curve resulting from the signature model from the training set, “frozen” and directly applied onto the previously unseen test set samples; (C) The procedure was repeated to a total of 10 times, in 10 different sets of randomly created training and test sets. The area under the ROC-curve (AUC values) generated by the frozen biomarker signature models in each corresponding test set were plotted; (D) The antibody score derived from the overall ranking in the backward elimination (BE) process (open circles) was compared to the score based on the T-test (W) test ranking (filled circles).

[0310] FIG. 3. Discrimination of PDAC stages vs. controls.

[0311] A) AUC-values from SVM analysis using unfiltered data (all antibodies), comparing NC to patients grouped according to their PDAC stage. B) Antibodies with Wilcoxon p<0.05 in one or more PDAC stages vs NC. “UP”=up-regulated, “DOWN”=down-regulated in PDAC vs NC, white=no significant difference.

[0312] FIG. 4. Differentiation of primary tumor location and comparison to a previous study in serum (Gerdtsson, 2015).

[0313] Serum from 156 PDAC patients collected at 5 different sites in Spain for the PANKRAS II [Parker etal., 2011, Porta et al., 1999] study (Gerdtsson et al., 2016, Mol Oncol. 10(8):1305-16).

[0314] “UP”=up-regulated, “DOWN”=down-regulated in Head vs Body/Tail tumors, N/A=antibody not included in study.

[0315] FIG. 5. Comparison to previous cohorts.

[0316] A) Details of the three studies being compared. B) Venn diagram derived from overlapping markers analyzed in a (i) Caucasian cohort of Stage III-IV PDAC vs. controls , (ii) Chronic pancreatitis patients vs. controls, and the current (iii) Chinese cohort of Stage PDAC vs. controls. For comparative reasons, only the stage III+IV samples were included in the current cohort. Numbers denotes significantly (Wilcoxon p<0.05) differentially expressed markers. [1] Wingren C, Sandstrom A, Segersvard R, Carlsson A, Andersson R, Lohr M, Borrebaeck C A. Identification of serum biomarker signatures associated with pancreatic cancer. Cancer Res. 2012; 72: 2481-90; [2] Serum proteome profiling of pancreatitis using recombinant antibody microarrays reveals disease-associated biomarker signatures. Proteomics Clin Appl. 2012; 6: 486-96.

### EXAMPLE

[0317] Abstract

[0318] In this study, a recombinant antibody microarray platform was used to analyse 213 plasma samples from pancreatic cancer patients and normal control individuals. The cohort was stratified according to disease stage, i.e. resectable disease (stage I/II), locally advanced (stage III) and metastatic disease (stage IV). SVM analysis showed that all PDAC stages could be discriminated from controls. This is the first time patients with stage I/II PDAC tumours could be discriminated from controls with high accuracy based on a plasma protein signature, which indicates a possibility for early diagnosis and an increased rate of surgically resectable tumors.

[0319] Introduction

[0320] Pancreatic ductal adenocarcinoma (PDAC) is one of the deadliest cancers with a 5-year survival rate of 3-4%. A key driver behind this poor prognosis is the current inability to diagnose patients at an early stage. Data supports that it takes more than five years from tumor initiation until the acquisition of metastatic ability (Yachida et al., 2010), which clearly demonstrates a window of opportunity for early detection if accurate markers were available. At the time of diagnosis, patients have often developed late-stage disease, and only approximately 15% of the patients have resectable tumors (Conlon et al., 1996; Sohn et al., 2000). The 5-year survival of these patients, displaying large resected tumors, is only 10-20% (Conlon et al., 1996; Sohn et al., 2000). However, the 5-year survival increases to 30-60% if tumors≤20 mm (Stage I-II) can be resected (Furukawa et al., 1996; Shimizu et al., 2005). The late diagnosis (Stage III-IV) is due to unspecific clinical symptoms in combination with the lack of markers for early diagnosis, something which is addressed in this study. Interestingly, studies suggest that pancreatic tumors could be resectable as early as six months prior to clinical diagnosis at an asymptomatic stage (Gangi et al., 2004; Pelaez-Luna et al., 2007).

[0321] The so far most evaluated marker for PDAC, CA19-9, suffers from poor specificity, with elevated levels in several other indications, as well as a complete absence in patients that are genotypically Lewis a-b- (5% of the population). Consequently, the use of CA19-9 for pancreatic cancer screening is not recommended (Locker et al., 2006). Today, no other single biomarker has been shown to accurately diagnose PDAC, although recent discovery studies have demonstrated that both exosomes and nucleosomes contain information associated with pancreatic cancer (Bauden et al., 2015; Melo et al., 2015). However, the field of cancer diagnostics is today moving towards panels of markers, since this yields increased sensitivity and specificity (Brand et al., 2011; Bunger et al., 2011).

[0322] Inflammation seems to be a critical component of tumor progression (Coussens and Werb, 2002) and the immunoregulatory plasma proteome may consequently be a source of potential cancer biomarkers.

[0323] Previous studies have also demonstrated that an increased number (n=20-25) of immunoregulatory proteins will yield highly disease-specific signatures, reflecting a systemic response to disease (Carlsson et al., 2011b; Ingvarsson et al., 2008; Wingren et al., 2012). However, analysis of the immunoregulatory proteome is associated with several challenges, such as, (i) plasma proteins display a vast dynamic concentration range; (ii) cancer markers are more likely to be found among the most low-abundant proteins (Haab et al., 2005; Surinova et al., 2011); (iii) disease-associated changes in plasma levels of low-abundant markers is expected to be small, requiring a significant number of samples for adequate statistics (Alonzo et al., 2002).

[0324] To meet these challenges, we have in the present study analyzed 213 plasma samples from Chinese patients with pancreatic cancer Stage I-IV and normal controls, using a sensitive antibody microarray platform. The aim was to identify stage-associated PDAC markers by comparing control samples to stage I-IV and the results support the concept that the information content in a simple blood sample is enough to find even the earlier disease stages. Consequently, enables early diagnosis of PDAC, particularly for the benefit of patients at high risk, such as chronic pancreatitis, hereditary PDAC, and Peutz-Jeghers syndrome patients.

[0325] Material and Methods

[0326] Plasma Samples

[0327] This retrospective study was approved by the Ethics Committee of Tianjin Medical University Cancer Institute and Hospital (TMUCIH). After informed consent, blood was collected at TMUCIH, plasma was isolated and stored at −80° C. A total of 213 plasma samples, collected from Jan. 1, 2012 to Dec. 13, 2013, were used (Table 1). The enrolled PDAC patients (n=118) were all Chinese Han ethnicity and treated at TMUCIH. None of the patients had received chemotherapy or radiotherapy at the time of blood draw. All PDAC samples were cytology confirmed by experienced pathologists. Patients were diagnosed with pancreatic ductal adenocarcinoma with the following exceptions: Malignant serous cystadenoma (n=1), pancreatic sarcoma (n=2), tubular papillary pancreatic adenocarcinoma (n=1). Five patients were diagnosed with PDAC with liver metastasis. Data on tumor stage and size at diagnosis, and tumor location within the pancreas were based on clinical pathology. Staging was performed according to the American Cancer Society's guidelines (Table 1) and the extent of resection was classified as R0. Normal control (NC) samples (n=95) were collected from healthy inhabitants of Tianjin at their routine physical examination at TMUCIH, and were genetically unrelated to the PDAC patients (Table 1). Sample IDs were recoded and randomized at labelling, and sample annotation and clinical data was blinded to the operator at all downstream experimental procedures. All samples were labelled at one single occasion, using a previously optimized protocol (Wingren et al., 2012).

[0328] Generation of Antibody Microarrays

[0329] The antibody microarrays contained 350 human recombinant scFv antibodies, selected and generated from in-house designed phage display antibody libraries, produced in E. coli as previously been described (Pauly et al., 2014) and printed onto slides in 14 arrays/slide and 3 replicate spots/array. All slides used for this study were printed at a single occasion, shipped to TMUCIH in China, and used for analysis within 4 weeks after printing.

[0330] Antibody Microarray Analysis

[0331] Ten slides (140 individual subarrays) were processed per day with randomized sample order. Briefly, arrays were blocked with PBSMT, washed with PBST, and incubated with biotinylated plasma samples for 2 h at RT. Unbound proteins were washed off, and bound proteins were detected using 1 μg/mL Alexa Fluor647-Streptavidin (1 h at RT). Excess reagent was washed off, and slides were dried and immediately scanned in a LuxScan 10K Microarray scanner (CapitalBio) at 10 μm resolution using the 635 nm and the 532 nm excitation lasers.

[0332] Data Acquisition, Quality Control and Pre-Processing

[0333] Signal intensities were quantified by two trained analysts (ASG and MN), blinded to patient ID and clinical data, using the ScanArray Express software version 4.0 (PerkinElmer Life and Analytical Sciences) with the fixed-circle option. For each microarray a grid was positioned, using the Alexa Fluor555 signals from microarray printing, and used to quantify the Alexa Fluor647 signal corresponding to the relative level of bound protein. Eleven samples (10 PDAC, 1 NC) were not quantified due to poor quality images resulting from of high background and/or low overall signals. For quantified arrays, the spot saturation, mean intensity and signal-to-noise ratio of each spot were evaluated. Fourteen antibodies were excluded because (i) the median signal intensity was below the cut-off limit, defined as the background (average PBS signal)+2 standard deviations (n=8), (ii) saturated signal in the lowest scanner intensity setting in more than 50% of samples (n=1), and (iii) inadequate antibody printing (n=5). Based on the remaining 202 samples and 336 antibodies, a dataset was assembled using the mean spot intensity after local background subtraction. Each data point represented an average of the 3 replicate spots, unless any replicate CV exceeded 15% from the mean value, in which case it was discarded and the average of the 2 remaining replicates was used instead. The average CV of replicates was 7.9% (±4.1%). Applying a cut-off CV of 15%, 79% of data values were calculated from all 3 replicates and the remaining 21% from 2 replicates. Furthermore, patients with jaundice (n=27) were compared to patients without jaundice (n=81), to analyze whether the bilirubin level was a confounding factor in the antibody microarray analysis. Similarly, a gender-adjusted dataset was generated to assess whether gender was a confounding factor. The logged data was normalized, using the empirical Bayes algorithm ComBat (Johnson et al., 2007) for adjusting technical variation, followed by a linear scaling of data from each array to adjust for variations in sample background level. The scaling factor was based on the 20% of antibodies with the lowest standard deviation across all samples and was calculated by dividing the intensity sum of these antibodies on each array with the average sum across all arrays (Carlsson et al., 2008; Ingvarsson et al., 2008).

[0334] Data Analysis

[0335] The sample and variable distribution was analyzed and visualized, using a principal component analysis based program (Qlucore, Lund, Sweden). ANOVA was applied for an initial filtering of data. The performance of individual markers was evaluated using Wilcoxon or Student's t-test, Benjamini Hochberg procedure for false discovery rate control, and fold changes. Separation of different subgroups was assessed using support vector machine (SVM), applying a linear kernel with the cost of constraints set to 1. Models for discriminating two groups were created, using a leave-one-out cross validation procedure.

[0336] To minimize over-interpretation and to demonstrate robustness of the data set, it was randomly divided into training and test sets, and the SVM-based backward elimination algorithm was applied in the training sets. Consequently, biomarker signatures were generated in training sets of the data, consisting of ⅔ of the total samples from each subgroup, and evaluated in a test sets containing the remaining ⅓ of samples. In training sets, filtering was performed using an SVM-based Backward Elimination algorithm, as previously described (Carlsson et al., 2011a) and models based on the resulting antibody signatures were tested in the corresponding test sets. Ten different pairs of training and test sets were used for this purpose, resulting in a consensus list in which each antibody was given an elimination score corresponding to its median order of elimination in the 10 training sets. The performance was assessed using receiver operating characteristics (ROC) curves and reported as area under the curve (AUC) values. The sensitivity and specificity, positive and negative predictive values of each signature in its respective test set were noted for the SVM decision value threshold corresponding to the maximum sum of sensitivity and specificity.

[0337] Results

[0338] Discrimination Between Cases and Controls and Identification of Plasma Protein Signatures Associated with Pancreatic Cancer

[0339] Initially, we show that PDAC cases can be discriminated from normal controls, using PCA, q-value filtration and SVM analysis with leave-on-out cross validation. Principal component analysis revealed a moderate separation of PDAC and NC samples (FIG. 1A) and differential analysis with q-value cut-off of 0.1 resulted in 11 antibodies displaying significant different expression levels in PDAC vs. NC (FIG. 1B). Three of these were targeting Apolipoprotein A1 (Apo-A1) and showed decreased proteins levels in PDAC compared to NC. Properdin, C1q, C3, IgM and IL-8 also showed reduced levels in PDAC, while VEGF, MAPK-8 and CHP-1 were elevated in the cancer group. Furthermore, SVM with leave-one-out cross validation using data from all 336 antibodies demonstrated that PDAC and NC were separated with an AUC-value of 0.88 (p-value=6.4×10⁻²¹, FIG. 1C). Of note, patients with jaundice could not be significantly discriminated from patients without jaundice, demonstrating that hyperbilirubinemia was not a confounding factor (data not shown). A comparison of significant (Wilcoxon p<0.05) markers in the gender-adjusted dataset showed that neither gender was a confounding factor (Table 4).

[0340] The high level of differentiation between PDAC and NC using unfiltered data (AUC 0.88) motivated in-depth data filtering for identifying a condensed PDAC-associated protein signature. To avoid over-fitting the model to the data, samples were first separated into training sets for generating antibody signatures models which were then evaluated on separate test sets. In the training sets, antibodies were filtered using SVM-based backward elimination and the Kullback-Leibler (K-L) error in the classification was plotted against the number of eliminated antibodies. FIG. 2A illustrates the elimination process in the first training set, in which a distinct minimum of the error was observed after 313 iterations, corresponding to a final 24 antibody signature Based on this signature, an SVM model was constructed in the training set and evaluated in a separate test set, where it generated an AUC-value of 0.87 (FIG. 2B). To test the robustness of the data set this elimination procedure was repeated in a total of 10 different, randomly generated pairs of training and test sets, which in term generated 10 signatures identified for optimal separation of cancer vs. controls. The length of signatures ranged from 17-29 antibodies (median 23.5). The AUC-values in the test sets ranged from 0.77-0.87, with an average of 0.83 (FIG. 2C). The sensitivity and specificity had average values of 0.77 (ranging 0.56-0.94) and 0.86 (ranging 0.55-0.97), respectively, with the corresponding average positive predictive value of 0.86 (ranging 0.71-0.97) and average negative predictive value of 0.77 (ranging 0.64-0.89).

[0341] Each antibody was scored based on the reverse order of elimination, with number 1 being the last antibody to be eliminated, and ranked in order of their median elimination score from the 10 sequential elimination rounds. Table 2 lists the 25 highest ranked antibodies, with their p- and q-values, the p-value ranking, and the fold change for PDAC vs. NC. The top 2 antibodies Properdin and VEGF with median elimination scores of 1 and 2, respectively, were the last eliminated antibodies in 9/10 (Properdin), and the second last eliminated in 8/10 (VEGF) training sets. The top 25 ranked antibodies together represented 20 different specificities.

[0342] The backward elimination procedure was designed to identify the optimal combination of antibodies, not taking into consideration one-dimensional separation of data based on individual antibodies, and the consensus signature presented in Table 2 is based solely on the backward elimination ranking. Of note, the top two antibodies were also the two highest ranked on basis of p- and q-values. In fact, the five highest ranked antibodies all displayed highly significant p- and q-values for PDAC vs. NC (p<4.47E-06 and q<5.00E-04). The backward elimination rank (BE-score) and the t-test rank (W-score) for the consensus signature antibodies were plotted together in FIG. 2D. The W-score starts to deviate from the BE-score after the top five antibodies, and then lost any correlation. Thus, the five highest ranked antibodies (Properdin, VEGF, IL-8, C3, and CHP-1) make out a highly stable core of the consensus signature, as indicated by both the backward elimination procedure and the univariate differential expression analysis. However, the current data, in consistency with previous datasets analyzed with similar approaches, shows that the signature core needs to be supplemented by orthogonal markers to reach a clinically relevant level of accuracy in terms of sensitivity and particularly, specificity, for discriminating PDAC vs NC.

[0343] Discrimination Between Stage I-IV of Pancreatic Cancer

[0344] Discrimination between different disease stages is of high interest since this is associated with the ability to diagnose pancreatic cancer in its non-invasive stage. In an attempt to assess the significance of identified markers for early diagnosis, the PDAC samples were stratified according to disease stage. SVM with leave-one-out cross validation showed that all PDAC stages were separated from NC and that classification accuracy increased with disease progression, with AUC-values of 0.71, 0.86, 0.90 and 0.93 for discriminating NC from stage I, II, III, and IV, respectively (FIG. 3a). The subgrouping into stages resulted in smaller sample numbers, ranging from n=11 for stage I to n=34 for stage III patients. For increased statistical power, a grouping into early confined disease (stage I/II) and late invasive disease (stage III/IV) was also performed. These groups were discriminated from NC with AUC values of 0.80 (early stage) and 0.96 (late stage).

[0345] FIG. 3b shows all antibodies displaying significant (Wilcoxon p<0.05) differential protein levels in at least one of the stage groups when compared to NC. Among the five described core candidate markers (Properdin, VEGF, IL-8, C3, and CHP-1), Properdin was down-regulated in all stages, CHP-1 was up-regulated in all stages, and IL-8 was down-regulated in Stage III/IV disease only.

[0346] It is noteworthy that in our previous study on serum markers in Stage III/IV Caucasian PDAC patients, C5 was ranked as the most prominent marker in a backward elimination filtering analysis, while the current study ranked the same antibody as number 14 (Table 2). However, when stage-specific analysis was performed it was evident that C5 was elevated only in late stage disease, which is coherent with the former study (Wingren et al., 2012). Of note, the stage-specific analysis pointed out several early marker candidate proteins, e.g. elevated levels of BKT, CDK2, MAPK-8, AGAP-2, IL-13, IL-6, PTPRO, USP-7, MUC-1, and reduced levels of Apo-A1 and C1q measurable already at stage I/II disease.

[0347] Markers Associated with Tumor Location

[0348] The samples were also grouped by the primary tumor location in the pancreas, and plasma from tumors located in the head of pancreas was compared to those located in the body lci and/or tail of pancreas. Samples with tumors at other locations (neck=4, neck+body=1, head+tail=1) were excluded from this analysis. Applying a cut-off of Wilcoxon p<0.05, 37 antibodies showed significantly different intensity levels in Head vs. Body/Tail (FIG. 4). The AUC for Head (n=63) vs. Body/Tail (n=39) localized tumors was 0.64 (p=5.4e-3). Although the groups were not distinctly separated in the SVM analysis, the 37 significant antibodies overlapped remarkably well with the antibodies identified in an earlier study (FIG. 4), despite differences in regards to sample format (serum/plasma), ethnicity (Caucasian/Asian), technical processes (assay protocol and instrumentation) and data processing (normalization procedures) (Gerdtsson, 2015). The only protein not correlating with the former study was C3, which was found to be elevated in plasma but reduced in serum in Head vs. Body/Tail localized tumors. Of note, the proteins that discriminated between Head and Body/Tail localized tumors (FIG. 4) were also distinctly different from the protein signatures for PDAC vs. NC (Table 2).

[0349] Correlation Between Markers Derived from Caucasian and Chinese Populations

[0350] We next assessed the concordance of the plasma protein signature in the Chinese pancreatic cancer subjects with the serum protein signature previously identified in a late stage PDAC Caucasian cohort, analyzed in relation to healthy controls as well as to patients with pancreatitis (Wingren et al., 2012). Of note, the antibody microarray content has expanded significantly since the former study, making correlation measures of the two studies difficult. The former study only contained 36% of the antibodies currently used and did for example not include the core marker CHP-1. However, the other four core signature lo proteins (Properdin, VEGF, IL-8 and C3) were all part of the previously published serum PDAC signature. In addition to the core panel, there was a clear overlap between the two ethnic cohorts when comparing the 25 highest ranked antibodies in the two studies (Table 2), demonstrating that blood-based proteomics analysis is less affected by the genetic make-up of sample donors (Caucasian/Asian), or sample format (serum/plasma).

[0351] In the previous Caucasian cohort it was also shown that PDAC could be differentiated both from controls and pancreatitis (Wingren et al., 2012) . Since our Asian cohort did not include chronic pancreatitis samples, we instead compared significant (Wilcoxon p<0.05) markers present in this and previous studies (Sandstrom et al., 2012; Wingren et al., 2012). Five markers (C3, C5, IL-12, IL-8, Properdin) were commonly expressed in both serum and plasma PDAC samples, as well as in pancreatitis samples. Despite this overlap, the PDAC-associated proteins were notably different compared to chronic pancreatitis. Moreover, the current and previous studies have demonstrated that it is the combination of markers in a multiplexed signature that will deliver the most precise accuracy, regardless of whether a subset of the markers are overlapping with inflammatory or non-related indications.

[0352] Discussion

[0353] For the identification of a plasma marker signature two complementary strategies were initially used, (i) univariate differential expression analysis generating a multiple-testing corrected q-value for each antibody in the assay, and (ii) a backward elimination approach designed to pinpoint the optimal combination of markers, contributing with orthogonal information for discriminating cases and controls (Carlsson et al., 2011a). The two strategies resulted in the identification of a robust core signature of the five proteins Properdin, VEGF, IL-8, C3, and CHP-1. Properdin, or Complement Factor P, was previously identified in two independent studies as strongly down-regulated in both serum (Wingren et al., 2012) and plasma (Gerdtsson et al, unpublished observations), but has apart from that, to the best of our knowledge, not previously been associated with PDAC. In contrast, VEGF, associated with the angiogenesis-dependence of tumor growth, is a known upregulated marker in many cancers including PDAC (Itakura et al., 1997). The VEGF antibody, which specificity has been validated by mass spectrometry, has also in earlier studies demonstrated a significantly elevated VEGF level in PDAC (Gerdtsson, 2015; Wingren et al., 2012). Also IL-8 and Complement Factor C3 have previously been shown to be associated with late stage pancreatic cancer (Chen et al., 2013; Shaw et al., 2014; Wingren et al., 2012). In contrast, CHP-1, Calcineurin Homologous Protein-1, has not previously been measured and we believe its association with PDAC is novel to this study. CHP-1 is part of the Ca²⁺-binding family, and is a widely expressed protein localized in multiple subcellular compartments. Apart from being involved in trafficking across the plasma membrane, the functions of this presumably pluripotent protein is largely unknown (Jimenez-Vidal et al., 2010)

[0354] The results showed that the core signature needed to be supplemented with additional proteins in order to achieve the highest possible sensitivity and specificity. Here, approximately 23 markers were shown to deliver an optimal discrimination of PDAC vs. NC. In addition to the 5-protein core, several potential markers of interest were identified. Apo-A1 was one of the strongest differentially expressed proteins, as shown by all three Apo-A1-specific antibodies (q-values 0.003-0.02). Its significant down-regulation in plasma from PDAC patients has previously been seen (Honda et al., 2012) (Gerdtsson et al, unpublished observations). Apo-A1 is the major component of high density lipoprotein (HDL) in plasma and decreased levels of HDL are associated with poor cardiovascular health. Thus the reduced Apo-A1 levels observed in this study may reflect the association of PDAC with smoking and obesity. Another strongly down-regulated marker was Complement Factor C1q, in accordance with our previous study (Wingren et al., 2012). It is noteworthy that although both Apo-A1 and C1q were among the top markers based on univariate analysis, they were not included in the consensus signature derived from the backward elimination analysis, which only takes into account the performance of the combined signature and not the individual markers therein. In contrast, MAPK-8 was identified as a high scoring marker by both approaches. MAPK-8, a serine/threonine protein kinase involved in several cellular processes and signaling pathways, has not previously been analyzed in multiparametric assays and its discriminatory power and role in PDAC needs to be confirmed in future studies. Of note, although the sample subgroups were well age matched the PDAC and NC group had a skewed gender distribution. To investigate if the classifier for PDAC vs. NC was affected by the bias in gender, a gender adjusted dataset was created by an additional ComBat normalization step. The result clearly demonstrated that the list of significant antibodies for PDAC vs. NC in the gender adjusted dataset was highly similar to that of the original dataset. Furthermore, an SVM based analysis also demonstrated that male vs female were poorly separated, as compared to PDAC vs NC, again showing that gender was not a confounding factor for the PDAC vs NC classifiers.

[0355] To the best of our knowledge, this is the first proteomics study identifying stage-specific PDAC markers in plasma. Since early diagnosis significantly increases the life expectancy of PDAC patients (Furukawa et al., 1996; Shimizu et al., 2005), the defined markers associated with stage I/II are of particular importance when designing a clinically relevant test. Although the discrimination of PDAC vs. NC increased with PDAC stage, we were still able to discriminate stage I/II patients from normal individuals. The results are based on using all data from the microarray analysis, but could be condensed to signatures of high power. Several proteins, including AGAP-2, BTK, CDK-2, IL-13, IL-6, MUC-1, PTPRO, USP-7, were shown to have elevated levels in locally confined early stage cancer specifically. Four of these, AGAP-2, CDK-2, PTPRO, and USP7, have not previously been measured in our microarray assay. CDK-2, or Cyclin-dependent kinase 2, is involved in controlling the cell cycle and the aberrant activation of the CDKs is a well-known hallmark of many cancers, including PDAC (Feldmann et al., 2011). The remaining novel markers have not previously been associated with PDAC specifically Other PDAC markers that have been previously identified (Ingvarsson et al., 2008; Wingren et al., 2012), include MUC-1 which is overexpressed in 90% of PDAC cases (Winter et al., 2012), the cytokines IL-6 (Bellone et al., 2006) and IL-13 (Gabitass et al., 2011), as well as the tyrosine kinase BTK.

[0356] The focus of the present study was indeed the identification of stage-specific plasma proteins and the ability to discriminate between resectable pancreatic cancer and disseminated disease. However, differential diagnosis of cancer versus pancreatitis is sometimes difficult and an issue deciphered in a recent study focused in particular on inflammation in pancreas, where we showed that protein signatures could be identified that clearly discriminated between acute, chronic and autoimmune pancreatitis and normal controls (Sandstrom et al., 2012). Importantly, the inflammation associated protein signatures also differed from the Stage I, II, III, IV associated marker signatures in the present study. These findings were further supported by a previous study identifying a signature discriminating between pancreatic cancer patients and a combination of controls, including patients with different inflammatory indications of the pancreas, as well as healthy individuals (Wingren et al., 2012).

[0357] The biological diversity of tumors due to localization in pancreas has been previously demonstrated (Ling et al., 2013). Tumors in the body and tail of pancreas are rarer than tumor in the head of pancreas (77% of PDAC) (Lau et al., 2010). Because of differences in e.g. blood supply and lymphatic and venous backflow, there are also differences in the disease presentation with body and tail tumors causing less jaundice, more pain, higher albumin and CEA levels and lower CA19-9 levels (Eyigor et al., 2010; Watanabe et al., 2004). Body and tail tumors are more often detected at a late stage than head tumors and have a higher rate of metastasis. As the biological variances can result in different treatment efficiency (Wu et al., 2007), markers that can discriminate between tumor localization would be of clinical relevance and could aid personalized treatment strategies. However, few differences have been found on a genetic level, with no significant variation in the overall number of mutations, deletions and amplifications, or in K-ras point mutations (Ling et al., 2013). Here, 37 antibodies identified markers that showed on differential protein expression levels between head and body/tail tumors, and this expression pattern correlated remarkably well with a previous study. Consequently, these results are encouraging for a future development of a blood protein biomarker signature discriminating body/tail and head tumors at an early disease stage.

[0358] Ethnic genetic diversity is well described and is, in addition to environmental factors, coupled to e.g. the incidence and progression of cancer in different parts of the world (Gupta et al., 2014; Rastogi et al., 2004). On the contrary, we here show that PDAC patients of Asian and Caucasian origin express similar disease-associated protein signatures. While biological heterogeneity is indeed a hurdle in the search for genetic biomarkers (Gupta et al., 2014), our findings indicate that proteomic biomarkers may be more robust and transferrable between different ethnicities, due to less diversity on a whole protein level as compared to genetic mutations.

[0359] In summary, we have demonstrated that resectable pancreatic cancer (stage I/II) as well as locally advanced (stage III) and distant metastatic (stage IV) disease could for the first time be accurately discriminated, a prerequisite for a test focusing on early diagnosis of pancreatic cancer. Furthermore, we provide information that plasma protein markers associated with different tumor locations in the pancreas could be identified.

### REFERENCES

[0360] Alonzo, T. A., Pepe, M. S., Moskowitz, C. S., 2002. Sample size calculations for comparative studies of medical tests for detecting presence of disease. Stat Med. 21, 835-852.

[0361] Bauden, M., Pamart, D., Ansari, D., Herzog, M., Eccleston, M., Micallef, J., Andersson, B., Andersson, R., 2015. Circulating nucleosomes as epigenetic biomarkers in pancreatic cancer. Clin Epigenet 7, 106.

[0362] Bellone, G., Smirne, C., Mauri, F. A., Tonel, E., Carbone, A., Buffolino, A., Dughera, L., Robecchi, A., Pirisi, M., Emanuelli, G., 2006. Cytokine expression profile in human pancreatic carcinoma cells and in surgical specimens: implications for survival. Cancer Immunol Immunother. 55, 684-698.

[0363] Brand, R. E., Nolen, B. M., Zeh, H. J., Allen, P. J., Eloubeidi, M. A., Goldberg, M., Elton, E., Arnoletti, J. P., Christein, J. D., Vickers, S. M., Langmead, C. J., Landsittel, D. P., Whitcomb, D. C., Grizzle, W. E., Lokshin, A. E., 2011. Serum biomarker panels for the detection of pancreatic cancer. Clin Cancer Res. 17, 805-816.

[0364] Bunger, S., Laubert, T., Roblick, U. J., Habermann, J. K., 2011. Serum biomarkers for improved diagnostic of pancreatic cancer: a current overview. J Cancer Res Clin Oncol. 137, 375-389.

[0365] Carlsson, A., Wingren, C., Ingvarsson, J., Ellmark, P., Baldertorp, B., Ferno, M., Olsson, H., Borrebaeck, C. A., 2008. Serum proteome profiling of metastatic breast cancer using recombinant antibody microarrays. Eur J Cancer 44, 472-480.

[0366] Carlsson, A., Wingren, C., Kristensson, M., Rose, C., Ferno, M., Olsson, H., Jernstrom, H., Ek, S., Gustaysson, E., Ingvar, C., Ohlsson, M., Peterson, C., Borrebaeck, C. A., 2011a. Molecular serum portraits in patients with primary breast cancer predict the development of distant metastases. Proc Natl Acad Sci U.S.A. 108, 14252-14257.

[0367] Carlsson, A., Wuttge, D. M., Ingvarsson, J., Bengtsson, A. A., Sturfelt, G., Borrebaeck, C. A., Wingren, C., 2011b. Serum protein profiling of systemic lupus erythematosus and systemic sclerosis using recombinant antibody microarrays. Mol Cell Proteomics. 10, M110 005033.

[0368] Chen, J., Wu, W., Zhen, C., Zhou, H., Yang, R., Chen, L., Hu, L., 2013. Expression and clinical significance of complement C3, complement C4b1 and apolipoprotein E in pancreatic cancer. Oncol Lett. 6, 43-48.

[0369] Conlon, K. C., Klimstra, D. S., Brennan, M. F., 1996. Long-term survival after curative resection for pancreatic ductal adenocarcinoma. Clinicopathologic analysis of 5-year survivors. Ann Surg. 223, 273-279.

[0370] Coussens, L. M., Werb, Z., 2002. Inflammation and cancer. Nature 420, 860-867.

[0371] Eyigor, C., Karaca, B., Kuzeyli-Yildirim, Y., Uslu, R., Uyar, M., Coker, A., 2010. Does the tumor localization in advanced pancreatic cancer have an influence on the management of symptoms and pain? J B.U.ON. 15, 543-546.

[0372] Feldmann, G., Mishra, A., Bisht, S., Karikari, C., Garrido-Laguna, I., Rasheed, Z., Ottenhof, N. A., Dadon, T., Alvarez, H., Fendrich, V., Rajeshkumar, N. V., Matsui, W., Brossart, P., Hidalgo, M., Bannerji, R., Maitra, A., Nelkin, B. D., 2011. Cyclin-dependent kinase inhibitor Dinaciclib (SCH727965) inhibits pancreatic cancer growth and progression in murine xenograft models. Cancer Biol Ther. 12, 598-609.

[0373] Furukawa, H., Okada, S., Saisho, H., Ariyama, J., Karasawa, E., Nakaizumi, A., Nakazawa, S., Murakami, K., Kakizoe, T., 1996. Clinicopathologic features of small pancreatic adenocarcinoma. A collective study. Cancer 78, 986-990.

[0374] Gabitass, R. F., Annals, N. E., Stocken, D. D., Pandha, H. A., Middleton, G. W., 2011. Elevated myeloid-derived suppressor cells in pancreatic, esophageal and gastric cancer are an independent prognostic factor and are associated with significant elevation of the Th2 cytokine interleukin-13. Cancer Immunol Immunother. 60, 1419-1430.

[0375] Gangi, S., Fletcher, J. G., Nathan, M. A., Christensen, J. A., Harmsen, W. S., Crownhart, B. S., Chari, S. T., 2004. Time interval between abnormalities seen on CT and the clinical diagnosis of pancreatic cancer: retrospective review of CT scans obtained before diagnosis. Am J Roentgenol. 182, 897-903.

[0376] Gerdtsson, A. S. M., N.; Säll, A.; Real, F. X.; Porta, M.; Skoog, P.; Persson, H.; Wingren, C.; Borrebaeck, C. A. K., 2015. A Multicenter Trial Defining a Serum Protein Signature Associated with Pancreatic Ductal Adenocarcinoma. Int J Proteomics 2015.

[0377] Gupta, S., Venkatesh, A., Ray, S., Srivastava, S., 2014. Challenges and prospects for biomarker research: a current perspective from the developing world. Biochim Biophys Acta 1844, 899-908.

[0378] Haab, B. B., Geierstanger, B. H., Michailidis, G., Vitzthum, F., Forrester, S., Okon, R., Saviranta, P., Brinker, A., Sorette, M., Perlee, L., Suresh, S., Drwal, G., Adkins, J. N., Omenn, G. S., 2005. Immunoassay and antibody microarray analysis of the HUPO Plasma Proteome Project reference specimens: systematic variation between sample types and calibration of mass spectrometry data. Proteomics 5, 3278-3291.

[0379] Honda, K., Okusaka, T., Felix, K., Nakamori, S., Sata, N., Nagai, H., Ioka, T., Tsuchida, A., Shimahara, T., Shimahara, M., Yasunami, Y., Kuwabara, H., Sakuma, T., Otsuka, Y., Ota, N., Shitashige, M., Kosuge, T., Buchler, M. W., Yamada, T., 2012. Altered plasma apolipoprotein modifications in patients with pancreatic cancer: protein characterization and multi-institutional validation. PLoS One 7, e46908.

[0380] Hou, J., Xu, J., Jiang, R., Wang, Y., Chen, C., Deng, L., Huang, X., Wang, X., Sun, B., 2013. Estrogen-sensitive PTPRO expression represses hepatocellular carcinoma progression by control of STAT3. Hepatol. 57, 678-688.

[0381] Huang, Y. T., Li, F. F., Ke, C., Li, Z., Li, Z. T., Zou, X. F., Zheng, X. X., Chen, Y. P., Zhang, H., 2013. PTPRO promoter methylation is predictive of poorer outcome for HER2-positive breast cancer: indication for personalized therapy. J Transl Med. 11, 245.

[0382] Ingvarsson, J., Wingren, C., Carlsson, A., Ellmark, P., Wahren, B., Engstrom, G., Harmenberg, U., Krogh, M., Peterson, C., Borrebaeck, C. A., 2008. Detection of pancreatic cancer using antibody microarray-based serum protein profiling. Proteomics 8, 2211-2219.

[0383] Itakura, J., Ishiwata, T., Friess, H., Fujii, H., Matsumoto, Y., Buchler, M. W., Korc, M., 1997. Enhanced expression of vascular endothelial growth factor in human pancreatic cancer correlates with local disease progression. Clin Cancer Res. 3, 1309-1316.

[0384] Jimenez-Vidal, M., Srivastava, J., Putney, L. K., Barber, D. L., 2010. Nuclear-localized calcineurin homologous protein CHP1 interacts with upstream binding factor and inhibits ribosomal RNA synthesis. J Biol Chem. 285, 36260-36266.

[0385] Jin, Q., Kong, B., Yang, X., Cui, B., Wei, Y., Yang, Q., 2007. Overexpression of CHP2 enhances tumor cell growth, invasion and metastasis in ovarian cancer. In vivo 21, 593-598.

[0386] Johnson, W. E., Li, C., Rabinovic, A., 2007. Adjusting batch effects in microarray expression data using empirical Bayes methods. Biostatistics 8, 118-127.

[0387] Lau, M. K., Davila, J. A., Shaib, Y. H., 2010. Incidence and survival of pancreatic head and body and tail cancers: a population-based study in the United States. Pancreas 39, 458-462.

[0388] Ling, Q., Xu, X., Zheng, S. S., Kalthoff, H., 2013. The diversity between pancreatic head and body/tail cancers: clinical parameters and in vitro models. Hepatobil Pancreat Dis Intl. 12, 480-487.

[0389] Locker, G. Y., Hamilton, S., Harris, J., Jessup, J. M., Kemeny, N., Macdonald, J. S., Somerfield, M. R., Hayes, D. F., Bast, R. C., Jr., 2006. ASCO 2006 update of recommendations for the use of tumor markers in gastrointestinal cancer. J Clin Oncol. 24, 5313-5327.

[0390] Melo, S. A., Luecke, L. B., Kahlert, C., Fernandez, A. F., Gammon, S. T., Kaye, J., LeBleu, V. S., Mittendorf, E. A., Weitz, J., Rahbari, N., Reissfelder, C., Pilarsky, C., Fraga, M. F., Piwnica-Worms, D., Kalluri, R., 2015. Glypican-1 identifies cancer exosomes and detects early pancreatic cancer. Nature 523, 177-182.

[0391] Motiwala, T., Kutay, H., Ghoshal, K., Bai, S., Seimiya, H., Tsuruo, T., Suster, S., Morrison, C., Jacob, S. T., 2004. Protein tyrosine phosphatase receptor-type O (PTPRO) exhibits characteristics of a candidate tumor suppressor in human lung cancer. Proc Natl Acad Sci U.S.A. 101, 13844-13849.

[0392] Pannala, R., Basu, A., Petersen, G. M., Chari, S. T., 2009. New-onset diabetes: a potential clue to the early diagnosis of pancreatic cancer. Lancet Oncol. 10, 88-95.

[0393] Pauly, F., Smedby, K. E., Jerkeman, M., Hjalgrim, H., Ohlsson, M., Rosenquist, R., Borrebaeck, C. A., Wingren, C., 2014. Identification of B-cell lymphoma subsets by plasma protein profiling using recombinant antibody microarrays. Leukemia Res. 38, 682-690.

[0394] Pelaez-Luna, M., Takahashi, N., Fletcher, J. G., Chari, S. T., 2007. Resectability of presymptomatic pancreatic cancer and its relationship to onset of diabetes: a retrospective review of CT scans and fasting glucose values prior to diagnosis. Am J Gastroenterol. 102, 2157-2163.

[0395] Rastogi, T., Hildesheim, A., Sinha, R., 2004. Opportunities for cancer epidemiology in developing countries. Nature Rev Cancer 4, 909-917.

[0396] Sandstrom, A., Andersson, R., Segersvard, R., Lohr, M., Borrebaeck, C. A., Wingren, C., 2012. Serum proteome profiling of pancreatitis using recombinant antibody microarrays reveals disease-associated biomarker signatures. Proteomics Clin Appl. 6, 486-496.

[0397] Shaw, V. E., Lane, B., Jenkinson, C., Cox, T., Greenhalf, W., Halloran, C. M., Tang, J., Sutton, R., Neoptolemos, J. P., Costello, E., 2014. Serum cytokine biomarker panels for discriminating pancreatic cancer from benign pancreatic disease. Mol Cancer 13, 114.

[0398] Shimizu, Y., Yasui, K., Matsueda, K., Yanagisawa, A., Yamao, K., 2005. Small carcinoma of the pancreas is curable: new computed tomography finding, pathological study and postoperative results from a single institute. J Gastroenterol Hepatol. 20, 1591-1594.

[0399] Sohn, T. A., Yeo, C. J., Cameron, J. L., Koniaris, L., Kaushal, S., Abrams, R. A., Sauter, P. K., Coleman, J., Hruban, R. H., Lillemoe, K. D., 2000. Resected adenocarcinoma of the pancreas-616 patients: results, outcomes, and prognostic indicators. J Gastrointest Surg. 567-579.

[0400] Song, M. S., Salmena, L., Carracedo, A., Egia, A., Lo-Coco, F., Teruya-Feldstein, J., Pandolfi, P. P., 2008. The deubiquitinylation and localization of PTEN are regulated by a HAUSP-PML network. Nature 455, 813-817.

[0401] Steinhauer, C., Wingren, C., Hager, A. C., Borrebaeck, C. A., 2002. Single framework recombinant antibody fragments designed for protein chip applications. BioTechniques Suppl. 38-45.

[0402] Stoevesandt, O., Taussig, M. J., 2012. European and international collaboration in affinity proteomics. N biotechnol. 29, 511-514.

[0403] Surinova, S., Schiess, R., Huttenhain, R., Cerciello, F., Wollscheid, B., Aebersold, R., 2011. On the development of plasma protein biomarkers. J Proteome Res. 10, 5-16.

[0404] Watanabe, I., Sasaki, S., Konishi, M., Nakagohri, T., Inoue, K., Oda, T., Kinoshita, T., 2004. Onset symptoms and tumor locations as prognostic factors of pancreatic cancer. Pancreas 28, 160-165.

[0405] Wingren, C., Borrebaeck, C. A., 2008. Antibody microarray analysis of directly labelled complex proteomes. Curr Opin Biotechnol. 19, 55-61.

[0406] Wingren, C., Sandstrom, A., Segersvard, R., Carlsson, A., Andersson, R., Lohr, M., Borrebaeck, C. A., 2012. Identification of serum biomarker signatures associated with pancreatic cancer. Cancer Res. 72, 2481-2490.

[0407] Wingren, C., Steinhauer, C., Ingvarsson, J., Persson, E., Larsson, K., Borrebaeck, C. A., 2005. Microarrays based on affinity-tagged single-chain Fv antibodies: sensitive detection of analyte in complex proteomes. Proteomics 5, 1281-1291.

[0408] Winter, J. M., Tang, L. H., Klimstra, D. S., Brennan, M. F., Brody, J. R., Rocha, F. G., Jia, X., Qin, L. X., D'Angelica, M. I., DeMatteo, R. P., Fong, Y., Jarnagin, W. R., O'Reilly, E. M., Allen, P. J., 2012. A novel survival-based tissue microarray of pancreatic cancer validates MUC1 and mesothelin as biomarkers. PLoS One 7, e40157.

[0409] Wu, T. C., Shao, Y. F., Shan, Y., Wu, J. X., Zhao, P., 2007. [Surgical effect of malignant tumor of body and tail of the pancreas: compare with pancreatic head cancer]. Zhonghua wai ke za zhi [Chinese journal of surgery] 45, 30-33.

[0410] Xia, C., Ma, W., Stafford, L. J., Liu, C., Gong, L., Martin, J. F., Liu, M., 2003. GGAPs, a new family of bifunctional GTP-binding and GTPase-activating proteins. Mol Cell Biol. 23, 2476-2488.

[0411] Yachida, S., Jones, S., Bozic, I., Antal, T., Leary, R., Fu, B., Kamiyama, M., Hruban, R. H., Eshleman, J. R., Nowak, M. A., Velculescu, V. E., Kinzler, K. W., Vogelstein, B., Iacobuzio-Donahue, C. A., 2010. Distant metastasis occurs late during the genetic evolution of pancreatic cancer. Nature 467, 1114-1117.

[0412] Zhao, G. Y., Lin, Z. W., Lu, C. L., Gu, J., Yuan, Y. F., Xu, F. K., Liu, R. H., Ge, D., Ding, J. Y., 2014. USP7 overexpression predicts a poor prognosis in lung squamous cell carcinoma and large cell carcinoma. Tumour Biol. 36, 1721-1729.

TABLE A

| | | | | | | |
|---|---|---|---|---|---|---|
| | | | | 1 vs | 2 vs | 1 + 2 vs |
| # | Short name | Accession # | 1-4 vs HC | HC | HC | HC |

(I) - Preferred 1/2/1 + 2

| | | | | | | |
|---|---|---|---|---|---|---|
| 1 | R-PTP-O | Q16827 | | ↑ | ↑ | ↑ |
| 2 | UBP7 | Q93009 | ↑ | ↑ | ↑ | ↑ |
| 3 | CHP-1 | Q99653 | ↑ | ↑ | ↑ | ↑ |
| 4 | MAPKK 2 | P36507 | ↓ | ↓ | ↓ | ↓ |
| 5 | MAPKK 6 | P52564 | | ↑ | ↑ | ↑ |

(II) - Optional 1/2/1 + 2

| | | | | | | |
|---|---|---|---|---|---|---|
| 6 | Apo-A1 | P02647 | ↓ | ↓ | ↓ | ↓ |
| 7 | BTK | Q06187 | ↑ | ↑↓ | ↑ | ↑ |
| 8 | C1q | P02745/6/7 | ↓ | ↓ | ↓ | ↓ |
| 9 | C3 | P01024 | ↓ | ↓ | ↓ | ↓ |
| 10 | C5 | P01031 | ↑ | ↑↓ | ↑ | ↑ |
| 11 | CDK-2 | P24941 | ↑ | ↑ | ↑ | ↑ |
| 12 | IgM | P01871 | ↓ | ↓ | ↓ | ↓ |
| 13 | IL-11 | P20809 | ↑ | ↑ | ↑ | ↑ |
| 14 | IL-12 | P29459/60 | ↑ | ↑ | ↑ | ↑ |
| 15 | IL-6 | P05231 | ↑↓ | ↑ | ↑ | ↑ |
| 16 | JAK3 | P52333 | ↑ | ↑ | ↑ | ↑ |
| 17 | MAPK8 | P45983 | ↑ | ↑ | ↑ | ↑ |
| 18 | MCP-1 | P13500 | ↑↓ | ↑ | ↑ | ↑ |
| 19 | MUC-1 | P15941 | ↑ | ↑ | ↑ | ↑ |
| 20 | Properdin | P27918 | ↓ | ↓ | ↓ | ↓ |
| 21 | VEGF | P15692 | ↑ | ↑ | ↑ | ↑ |

(III) - Preferred 1/1 + 2

| | | | | | |
|---|---|---|---|---|---|
| 22 | PRD14 | Q9GZV8 | ↑ | ↑ | ↑ |
| 23 | GRIP-2 | Q9C0E4 | | ↑ | ↑ |
| 24 | MAPK9 | P45984 | | ↑ | ↑ |
| 25 | PKB gamma | Q9Y243 | | ↑ | ↑ |
| | (AKT-3) | | | | |
| 26 | R-PTP-eta | Q12913 | | ↑↓ | ↑ |
| 27 | TopBP1 | Q92547 | | ↑ | ↑↓ |

(IV) - Optional 1/1 + 2

| | | | | | |
|---|---|---|---|---|---|
| 28 | CD40L | P29965 | | ↑ | ↑ |
| 29 | EGFR | P00533 | | ↑ | ↑ |
| 30 | HADH2 | Q6IBS9 | | ↑ | ↑ |
| 31 | ICAM-1 | P05362 | ↑↓ | ↑↓ | ↑↓ |
| 32 | IL-13 | P35225 | ↑↓ | ↑ | ↑ |
| 33 | IL-18 | Q14116 | | ↑ | ↑ |
| 34 | MYOM2 | P54296 | | ↓ | ↓ |
| 35 | Osteopontin | P10451 | | ↑ | ↑ |
| 36 | P85A | P27986 | | ↑↓ | ↑↓ |
| 37 | RANTES | P13501 | | ↑ | ↑ |
| 38 | TGF-b1 | P01137 | | ↑ | ↑ |
| 39 | IL-4 | P05112 | | ↑ | ↑ |

(V) - Preferred 2/1 + 2

| | | | | | |
|---|---|---|---|---|---|
| 40 | CIMS (13) | SSAYSR* | | ↑ | ↑ |
| 41 | GNAI3 | P08754 | | ↑ | ↑ |
| 42 | HsMAD2 | Q13257 | | ↑ | ↑ |
| 43 | hSpindly | Q96EA4 | | ↑ | ↑ |
| 44 | R-PTP-kappa | Q15262 | | ↑↓ | ↑↓ |
| 45 | STAT1 | P42224 | ↓↑ | ↑ | ↑ |

(VI) - Optional 2/1 + 2

| | | | | | |
|---|---|---|---|---|---|
| 46 | ATP-5B | P06576 | ↑ | ↑ | ↑ |
| 47 | C4 | P0COL4/5 | ↓ | ↓ | ↓ |
| 48 | CHX10 | P58304 | | ↑ | ↑ |
| 49 | Factor B | P00751 | | ↓ | ↓ |
| 50 | Her2/ErbB-2 | P04626 | ↑ | ↑ | ↑ |
| 51 | IL-1b | P01584 | | ↑↓ | ↑↓ |
| 52 | IL-7 | P13232 | ↑↓ | ↑ | ↑ |
| 53 | IL-10 | P22301 | | ↑ | ↑ |
| 54 | Lewis X | NA | | ↑ | ↑ |
| 55 | MCP-3 | P80098 | | ↑ | ↑ |
| 56 | Sialyl Lewis x | NA | | ↑ | ↑ |
| 57 | TBC1D9 | Q6ZT07 | | ↑ | ↑ |
| 58 | TNFRSF3 | P36941 | | ↑ | ↑ |

(VII) - Preferred 1

| | | | | |
|---|---|---|---|---|
| 59 | AGAP-2 | Q99490 | ↑↓ | ↑ |

(VIII) - Optional 1

| | | | | |
|---|---|---|---|---|
| 60 | C1-INH | P05155 | | ↑ |
| 61 | C1s | P09871 | | ↑↓ |
| 62 | GLP-1 R | P43220 | ↑↓ | ↑ |
| 63 | IL-2 | P60568 | | ↑↓ |
| 64 | KSYK | P43405 | | ↑ |
| 65 | MAPK1 | P28482 | | ↑ |

(IX) - Preferred 2

| | | | |
|---|---|---|---|
| 66 | TENS4 | Q8IZW8 | ↑ |

(X) - Optional 2

| | | | | |
|---|---|---|---|---|
| 67 | FASN | Q6PJJ3 | | ↑↓ |
| 68 | IL-3 | P08700 | ↑↓ | ↑↓ |
| 69 | IL-8 | P10145 | ↓ | ↑↓ |
| 70 | STAP2 | Q9UGK3 | | ↑↓ |

(XI) - Preferred 1 + 2

| | | | | |
|---|---|---|---|---|
| 71 | HsHec1 | O14777 | | ↑ |
| 72 | PAR-6B | Q9BYG5 | | ↑ |
| 73 | PGAM5 | Q96HS1 | ↑ | ↑ |

(XII) - Optional 1 + 2

| | | | |
|---|---|---|---|
| 74 | IFN-γ | P01579 | ↑ |
| 75 | IL-16 | Q14005 | ↑ |
| 76 | Sox11A | P35716 | ↑ |
| 77 | TNF-b | P01374 | ↑ |
| 78 | TNFRSF14 | Q92956 | ↑ |
| 79 | UPF3B | Q9BZI7 | ↑ |

(XIII) - Preferred 1-4

| | | | |
|---|---|---|---|
| 80 | LUM | P51884 | ↑↓ |
| 81 | PTPRO | Q16827 | ↑↓ |

(XIV) - Optional 1-4

| | | | |
|---|---|---|---|
| 82 | GM-CSF | P04141 | ↑ |
| 83 | IL-9 | P15248 | ↑↓ |
| 84 | LDL | P04114 | ↑↓ |
| 85 | ORP-3 | Q9H4L5 | ↑↓ |

*peptide antibody was selected against, not database accession number.
‘↑’ indicates the biomarker is up-regulated in PC;
‘↓’ indicates the biomarker is down-regulated in PC;
‘↑↓’ indicates the biomarker is dysregulated in PC, but the trend may be up- or down-regulation (i.e., the biomarker is up-regulated in some PC subtype(s), down-regulated in others, and/or non-dysregulated yet others);

TABLE 1
Clinical samples

| | No of | Gender | Median age | | |
|---|---|---|---|---|---|
| Group | samples | (M/F) | (range) | Tumor location | Stage grouping* |
| PDAC | 118 | 76/42 | 59 (21-83) | Head = 69, Body/Tail = 39 | |
| Stage I | 11 | 6/5 | 59 (48-71) | Head = 6, Body/Tail = | T1/2, N0, M0 |
| Stage II | 33 | 16/17 | 59 (46-83) | Head = 27, Body/Tail = 6 | T1-3, N0/1, M0 |
| Stage III | 38 | 28/10 | 59 (21-75) | Head = 22, Body/Tail = 12, | T4, any N, M0 |
| | | | | Neck/Neck + Body = 4 | |
| Stage IV | 36 | 26/10 | 59 (38-75) | Head = 14, Body/Tail = 20, | Any T & N, M1 |
| | | | | Neck/Head + Tail = 2 | |
| NC | 95 | 20/75 | 63 (52-74) | N/A | |
| Total | 213 | 96/117 | 62 (21-83) | | |

*Staging according to the guidelines of the American Cancer Society

TABLE 2
Top 25 signature candidate analytes

| | | | | | | | Previous |
|---|---|---|---|---|---|---|---|
| | | Median | | Benjamini- | | | elimination |
| Elimination | | elimination | Wilcoxon p- | Hochberg q- | Wilcoxon | Fold | rank (Wingren |
| rank | Name | score | value | value | rank | change | et al., 2012) |
| 1 | Properdin | 1 | 6.18E−15 | 2.08E−12 | 1 | 0.74 | 3 |
| 2 | VEGF (3) | 2 | 1.84E−08 | 3.10E−06 | 2 | 1.25 | 17 |
| 3 | IL-8 (3) | 11.5 | 1.99E−03 | 6.07E−02 | 11 | 0.87 | 114 |
| 4 | C3 (4) | 12.5 | 3.74E−05 | 3.15E−03 | 4 | 0.83 | N/A |
| 5 | CHP-1 (2) | 13 | 4.47E−06 | 5.00E−04 | 3 | 1.16 | N/A |
| 6 | C3 (3) | 17 | 1.31E−01 | 6.01E−01 | 72 | 1.08 | N/A |
| 7 | MAPK-8 (3) | 19.5 | 1.85E−04 | 7.76E−03 | 8 | 1.22 | N/A |
| 8 | MCP-1 (6) | 19.5 | 1.32E−01 | 6.01E−01 | 74 | 0.96 | N/A |
| 9 | IL-7 (2) | 23 | 2.53E−01 | 7.60E−01 | 111 | 1.03 | 21 |
| 10 | C4 (3) | 23.5 | 2.96E−03 | 8.29E−02 | 12 | 0.89 | N/A |
| 11 | IgM (5) | 24.5 | 5.61E−05 | 3.77E−03 | 5 | 0.92 | N/A |
| 12 | IL-3 (1) | 27 | 7.36E−02 | 5.72E−01 | 40 | 1.06 | 18 |
| 13 | IL-11 (3) | 28 | 2.17E−02 | 3.03E−01 | 24 | 1.08 | 35 |
| 14 | C5 (2) | 31 | 1.81E−02 | 2.84E−01 | 21 | 1.09 | 1 |
| 15 | IL-6 (6) | 32 | 4.95E−01 | 8.88E−01 | 187 | 0.97 | N/A |
| 16 | C3 (6) | 35 | 6.06E−02 | 5.66E−01 | 36 | 1.09 | N/A |
| 17 | ICAM-1 | 37 | 7.36E−01 | 9.37E−01 | 263 | 1.01 | N/A |
| 18 | MCP-1 (1) | 38.5 | 1.22E−01 | 5.89E−01 | 69 | 1.04 | 15 |
| 19 | LDL (1) | 39.5 | 2.33E−01 | 7.52E−01 | 104 | 1.02 | N/A |
| 20 | JAK3 | 42 | 1.96E−02 | 2.86E−01 | 23 | 1.05 | 34 |
| 21 | MAPK-8 (2) | 43 | 6.79E−02 | 5.72E−01 | 38 | 1.07 | N/A |
| 22 | MUC-1 (5) | 44.5 | 1.02E−02 | 2.29E−01 | 15 | 1.09 | 53 |
| 23 | BTK (3) | 44.5 | 2.06E−01 | 7.26E−01 | 93 | 1.03 | N/A |
| 24 | IL-7 (1) | 45 | 1.61E−01 | 6.61E−01 | 82 | 0.97 | 88 |
| 25 | LUM | 46.5 | 1.04E−01 | 5.89E−01 | 55 | 1.05 | N/A |

TABLE 3
Antibodies included on the array

| Antigen | Full name | No of scFvs |
|---|---|---|
| AGAP-2 | Arf-GAP with GTPase, ANK repeat and PH-dom.-containing protein 2 | 4 |
| Apo-A1 | Apolipoprotein A1 | 3 |
| Apo-A4 | Apolipoprotein A4 | 3 |
| ATP-5B | ATP synthase subunit beta | 3 |
| BTK | Tyrosine-protein kinase BTK | 4 |
| C1 inh. | C1 esterase inhibitor | 4 |
| C1q* | Complement C1q | 1 |
| C1s | Complement C1s | 1 |
| C3* | Complement C3 | 6 |
| C4* | Complement C4 | 4 |
| C5* | Complement C5 | 3 |
| CD40 | CD40 protein | 4 |
| CD40L | CD40 ligand | 1 |
| CDK-2 | Cyclin-dependent kinase 2 | 2 |
| CHP-1 | Calcineurin B homologous protein 1 | 2 |
| CHX-10 | Visual system homeobox 2 | 3 |
| CIMS-10 | Selection motif TEEQLK | 1 |
| CIMS-13 | Selection motif SSAYSR | 1 |
| CIMS-5 | Selection motif WTRNSNMNYWLIIRL | 1 |
| CK19 | Cytokeratin 19 | 3 |
| CT17 | Cholera toxin subunit B | 1 |
| CystC | Cystatin C | 4 |
| Digoxin | Digoxin | 1 |
| DUSP-9 | Dual specificity protein phosphatase 9 | 1 |
| EGFR | Epidermal growth factor receptor | 1 |
| Eotaxin | Eotaxin | 3 |
| ErbB-2 | Receptor tyrosine-protein kinase erbB-2 | 4 |
| Factor B* | Complement factor B | 4 |
| FASN | Fatty acid synthase | 4 |
| GAK | Cyclin G-associated kinase | 3 |
| GEM | GTP-binding protein GEM | 2 |
| GLP-1 | Glucagon-like peptide-1 | 1 |
| GM-CSF | Granulocyte-macrophage colony-stimulating factor | 6 |
| GNAI-3 | Guanine nucleotide-binding protein G(k) subunit alpha | 4 |
| GRIP-2 | Glutamate receptor-interacting protein 2 | 8 |
| HADH-2 | 3-hydroxyacyl-CoA dehydrogenase type-2 | 4 |
| HLA-DR/DP | HLA-DR/DP | 1 |
| ICAM-1 | Intercellular adhesion molecule 1 | 1 |
| IFN-g | Interferon gamma | 3 |
| IgM | Immunoglobulin M | 5 |
| IL-10* | Interleukin 10 | 3 |
| IL-11 | Interleukin 11 | 3 |
| IL-12* | Interleukin 12 | 4 |
| IL-13* | Interleukin 13 | 3 |
| IL-16 | Interleukin 16 | 3 |
| IL-18 | Interleukin 18 | 3 |
| IL-1a* | Interleukin 1 alpha | 3 |
| IL-1b | Interleukin 1 beta | 3 |
| IL-1ra | Interleukin-1 receptor antagonist protein | 3 |
| IL-2 | Interleukin 2 | 3 |
| IL-3 | Interleukin 3 | 3 |
| IL-4* | Interleukin 4 | 4 |
| IL-5* | Interleukin 5 | 3 |
| IL-6* | Interleukin 6 | 4 |
| IL-7 | Interleukin 7 | 2 |
| IL-8* | Interleukin 8 | 3 |
| IL-9 | Interleukin 9 | 3 |
| Integrin a-10 | Integrin alpha-10 | 1 |
| Integrin a-11 | Integrin alpha-11 | 1 |
| JAK3 | Tyrosine-protein kinase JAK3 | 1 |
| KRAS | GTPase KRas | 1 |
| KSYK | Tyrosine-protein kinase SYK | 2 |
| LDL | Low-density Lipoprotein | 2 |
| Leptin | Leptin | 1 |
| Lewis x | Lewis x | 2 |
| Lewis y | Lewis y | 1 |
| LUM | Lumican | 1 |
| MAD2L-1 | Mitotic arrest deficient 2-like protein 1 | 3 |
| MAP2K-2 | Mitogen-activated protein kinase kinase 2 | 3 |
| MAP2K-6 | Mitogen-activated protein kinase kinase 6 | 4 |
| MAPK-1 | Mitogen-activated protein kinase 1 | 4 |
| MAPK-8 | Mitogen-activated protein kinase 8 | 3 |
| MAPK-9 | Mitogen-activated protein kinase 9 | 6 |
| MATK | Megakaryocyte-associated tyrosine-protein kinase | 3 |
| MCP-1* | Monocyte chemotactic protein 1 | 9 |
| MCP-3 | Monocyte chemotactic protein 3 | 7 |
| MCP-4 | Monocyte chemotactic protein 4 | 3 |
| MUC-1 | Mucin 1 | 6 |
| Myom-2 | Myomesin-2 | 2 |
| NDC80 | Kinetochore protein NDC80 homolog | 3 |
| ORP-3 | Oxysterol-binding protein-related protein 3 | 2 |
| OSTP | Osteopontin | 3 |
| P85A | PI3-kinase subunit p85-alpha | 3 |
| PAK-7 | Serine/threonine-protein kinase PAK 7 | 3 |
| PAR-6B | Partitioning defective 6 homolog beta | 2 |
| PARP-1 | Poly [ADP-ribose] polymerase 1 | 1 |
| PGAM-5 | Phosphoglycerate mutase family member 5 | 4 |
| PKB gamma | RAC-gamma serine/threonine-protein kinase | 2 |
| PRD-14 | PR domain zinc finger protein 14 | 5 |
| Procath W | Procathepsin W | 1 |
| Properdin* | Properdin | 1 |
| PSA | Prostate-specific antigen | 1 |
| PTK-6 | Protein-tyrosine kinase 6 | 1 |
| PTPN-1 | Tyrosine-protein phosphatase non-receptor type 1 | 3 |
| PTPRJ | Protein-tyrosine phosphatase receptor type J | 8 |
| PTPRK | Protein-tyrosine phosphatase kappa | 8 |
| PTPRO | Protein tyrosine phosphatase U2 | 4 |
| PTPRT | Protein tyrosine phosphatase rho | 3 |
| RANTES | RANTES | 3 |
| RPS6KA2 | Ribosomal protein S6 kinase alpha-2 | 3 |
| Sialle x | Sialyl Lewis x | 1 |
| Sox11A | Transcription factor SOX-11 | 1 |
| SPDLY-1 | Spindly | 2 |
| STAP-2 | Signal-transducing adaptor protein 2 | 4 |
| STAT-1 | Signal transducer and activator of transcription 1-alpha/beta | 2 |
| TBC1D-9 | TBC1 domain family member 9 | 3 |
| TENS-4 | Tensin 4 | 1 |
| TGF-b1 | Transforming growth factor beta-1 | 3 |
| TM peptide | Transmembrane peptide | 1 |
| TNF-a | Tumor necrosis factor | 3 |
| TNF-b* | Lymphotoxin-alpha | 4 |
| TNFRSF-14 | Tumor necrosis factor receptor superfamily member 14 | 2 |
| TNFRSF-3 | Tumor necrosis factor receptor superfamily member 3 | 3 |
| TOPBP-1 | DNA topoisomerase 2-binding protein 1 | 2 |
| UBC-9 | Ubiquitin carrier protein 9 | 3 |
| UBE2C | Ubiquitin-conjugating enzyme E2 C | 2 |
| UCHLS | Ubiquitin carboxyl-terminal hydrolase isozyme LS | 1 |
| UPF3B | Regulator of nonsense transcripts 3B | 2 |
| USP-7 | Ubiquitin-specific-processing protease 7 | 4 |
| VEGF* | Vascular endothelial growth factor | 4 |

*Specificity determined by protein arrays, cytokine arrays, ELISA, blocking/spiking experiments and/or mass spectrometry.

TABLE 4
comparison of significant (Wilcoxon p < 0.05) markers

| | | | | cancer vs non- | | | |
|---|---|---|---|---|---|---|---|
| cancer vs non- | | | | cancer gender- | | | |
| cancer all data | | | | adjusted data | | | |
| PDAC (108) vs NC | | | | PDAC (108) vs NC | | | |
| (94) | | | | (94) | | | |
| ROC area: 0.88 | | | | ROC area: 0.89 | | | |
| | Fold | Wilcoxon p- | | | Fold | Wilcoxon p- | |
| Name | change | value | BH q-value | Name | change | value | BH q-value |
| Properdin | 0.741 | 6.18E−15 | 2.08E−12 | Properdin | 0.753 | 5.17E−14 | 1.74E−11 |
| VEGF | 1.252 | 1.84E−08 | 3.10E−06 | VEGF | 1.267 | 4.36E−09 | 7.33E−07 |
| CBPP22 | 1.164 | 4.47E−06 | 0.00050 | IgM | 0.912 | 3.30E−06 | 0.00030 |
| C3 | 0.830 | 3.74E−05 | 0.00315 | C3 | 0.815 | 3.62E−06 | 0.00030 |
| IgM | 0.924 | 5.61E−05 | 0.00377 | CBPP22 | 1.154 | 1.16E−05 | 0.00078 |
| C1q | 0.889 | 0.000129 | 0.00644 | C1q | 0.881 | 3.99E−05 | 0.00223 |
| MK08 | 1.218 | 0.000185 | 0.00776 | ApoA1 | 0.899 | 9.03E−05 | 0.00434 |
| ApoA1 | 0.885 | 0.000432 | 0.01615 | MK08 | 1.219 | 0.000142 | 0.00531 |
| IL-B | 0.874 | 0.001986 | 0.06066 | BTK | 1.083 | 0.000278 | 0.00933 |
| C4 | 0.888 | 0.002962 | 0.08293 | UBP7 | 1.101 | 0.000398 | 0.01178 |
| Her2 | 1.058 | 0.006326 | 0.16351 | Her2 | 1.078 | 0.000465 | 0.01202 |
| MAP2K2 | 0.939 | 0.007056 | 0.16935 | MUC1 | 1.110 | 0.000659 | 0.01582 |
| MUC1 | 1.086 | 0.010208 | 0.22866 | PRD14 | 1.074 | 0.000993 | 0.02225 |
| UBP7 | 1.078 | 0.011248 | 0.23620 | JAK3 | 1.074 | 0.001081 | 0.02271 |
| CS | 1.059 | 0.012983 | 0.25660 | MCP-3 | 1.083 | 0.001672 | 0.03305 |
| CDK2 | 1.072 | 0.014557 | 0.27173 | TNFRSF3 | 1.060 | 0.001922 | 0.03447 |
| ATPSB | 1.060 | 0.015457 | 0.27334 | MAP2K6 | 1.079 | 0.002002 | 0.03447 |
| PGAM5 | 1.071 | 0.016622 | 0.27926 | PGAM5 | 1.093 | 0.002051 | 0.03447 |
| MAP2K6 | 1.109 | 0.018576 | 0.28371 | MAPK9 | 1.100 | 0.002189 | 0.03502 |
| JAK3 | 1.053 | 0.019563 | 0.28579 | MCP1 | 1.107 | 0.002610 | 0.03863 |
| IL-11 | 1.079 | 0.021675 | 0.30345 | MAP2K2 | 0.933 | 0.002694 | 0.03863 |
| PRD14 | 1.049 | 0.031840 | 0.41147 | STAT1 | 1.073 | 0.002759 | 0.03863 |
| IL-12 | 1.069 | 0.039907 | 0.47888 | C4 | 0.888 | 0.003080 | 0.04139 |
| BTK | 1.050 | 0.048259 | 0.54050 | C5 | 1.071 | 0.003203 | 0.04139 |
| CSF2 | 1.039 | 0.048259 | 0.54050 | PTPRJ | 1.080 | 0.003330 | 0.04144 |

```
TABLE 5
apriori <- read.delim(“apri.txt”,header=FALSE)
apriori <- as.character(apriori[[1]])
aprioriBoolean <- is.element(rownames(data) , apriori)
filnamn<-“Stages I+II.txt”
rawfile <- read.delim(filnamn)
samplenames <- as.character(rawfile[,1])
groups <- rawfile[,2]
data <- t(rawfile[,-c(1:2)])
ProteinNames <- read.delim(filnamn,header=FALSE)
ProteinNames <- as.character(as.matrix(ProteinNames) [1,])
ProteinNames <- ProteinNames[-(1:2)]
rownames(data) <- ProteinNames
colnames(data) <- samplenames
library(MASS)
library(gplots)
library(e1071)
source(“NaiveBayesian”)
redgreen <- function(n)
    {
      c(
        hsv(h=0/6, v=c( rep( seq(1,0.3,length=5) , c(13,10,8,6,4) ) , 0 )
) ,
        hsv(h=2/6, v=c( 0 , rep( seq(0.3,1,length=5) , c(3,5,7,9,11) ) )
        )
    )
}
pal <- rev(redgreen(100));
svmLOOvalues <- function(data , fac){
  n1 <- sum(fac==levels(fac)[1])
  n2 <- sum(fac==levels(fac)[2])
  nsamples <- n1+n2
  ngenes <- nrow(data)
  SampleInformation <- paste(levels(fac)[1],“ ”,n1,“ , ”,levels(fac)[2],
“ ”,n2,sep=“”)
  res <- numeric(nsamples)
  sign <- numeric(nsamples)
  for (i in 1:nsamples){
  svmtrain <- svm(t(data[,−i]) , fac[−i] , kernel=“linear” )
  pred <- predict(svmtrain , t(data[,i]) , decision.values=TRUE)
  res[i] <- as.numeric(attributes(pred)$decision.values)
  facnames <- colnames(attributes(pred)$decision.values)[1]
  if (facnames ==
paste(levels(fac)[1],“/”,levels(fac)[2],sep=“”)){sign[i] <- 1}
  if (facnames ==
paste(levels(fac)[2],“/”,levels(fac)[1],sep=“”)){sign[i] <- −1}
  }
  if (length(unique(sign)) >1){print(“error”)}
  res <- sign * res
  names <- colnames(data , do.NULL=FALSE)
  orden <- order(res , decreasing=TRUE)
  Samples <- data.frame(names[orden],res[orden],fac[orden])
  ROCdata <- myROC(res,fac)
  SenSpe <- SensitivitySpecificity(res,fac)
return(list(SampleInformation=SampleInformation,ROCarea=
ROCdata[1],p.value=
ROCdata[2],SenSpe <- SenSpe,samples=Samples))
}
wilcoxtest <- function(prot,subset1,subset2){
  res <- wilcox.test(prot[subset1],prot[subset2])
  res$p.value
}
# Definierar foldchange
foldchange <- function(prot,subset1,subset2){
  2\hat{ }(mean(prot[subset1]) − mean(prot[subset2]))
}
# Definierar q-vardesberakningen
BenjaminiHochberg <- function(pvalues){
    # This function takes a vector of p-values as input and outputs
    # their q-values. No reordering of the values is performed
    NAindices <- is.na(pvalues)
    Aindices <- !NAindices
    Apvalues <- pvalues[Aindices]
    N <- length(Apvalues)
    orderedindices <- order(Apvalues)
    OrdValues <- Apvalues[orderedindices]
    CorrectedValues <- OrdValues * N /(1:N)
    MinValues <- CorrectedValues
    for (i in 1:N){MinValues[i] <- min(CorrectedValues[i:N])}
    Aqvalues <- numeric(N)
    Aqvalues[orderedindices] <- MinValues
    Qvalues <- pvalues
    Qvalues[Aindices] <- Aqvalues
    return(Qvalues)
}
AnalyseraMAA <- function(group1 ,group2){
  outputfiletxt <- paste(group1,“ versus ”,group2,“.txt” ,sep=“”)
  outputfilepdf <- paste(group1,“ versus ”,group2,“.pdf” ,sep=“”)
  subset1 <- is.element(groups , strsplit(group1,“,”)[[1]])
  subset2 <- is.element(groups , strsplit(group2,“,”)[[1]])
  wilcoxpvalues <- apply(data , 1 , wilcoxtest , subset1 , subset2)
  foldchange <- apply(data , 1 , foldchange , subset1 , subset2)
  QvaluesAll <- BenjaminiHochberg(wilcoxpvalues)
  QvaluesApriori <- numeric(length(wilcoxpvalues))
  QvaluesApriori[!aprioriBoolean] <- NA
  QvaluesApriori[aprioriBoolean] <-
BenjaminiHochberg(wilcoxpvalues[aprioriBoolean])
  HugeTable <-
cbind(ProteinNames,foldchange,wilcoxpvalues,QvaluesAll,
QvaluesApriori)
  write.table(HugeTable, file=outputfiletxt , quote=FALSE,
sep=“\t”,row.names=FALSE)
  color <- rep(‘black’ , length(subset1))
  color[subset1] <- ‘red’
  color[subset2] <- ‘blue’
  pdf(outputfilepdf)
  Sam <- sammon(dist(t(data[,subset1|subset2])) , k=2)
  plot(Sam$points , type=“n” , xlab = NA , ylab=NA, main=
“All proteins”,asp=1)
  text(Sam$point , labels = colnames(data[,subset1|subset2]),
col=color[subset1|subset2])
Sam <- sammon(dist(t(data[aprioriBoolean,subset1|subset2])) , k=2)
  plot(Sam$points , type=“n” , xlab = NA , ylab=NA, main=“Apriori
proteins” ,asp=1)
  text(Sam$point , labels = colnames(data[,subset1|subset2]),
col=color[subset1|subset2])
  heatmap.2(data[,subset1|subset2] , labRow = row.names(data),
trace=“none” , labCol =“” , ColSideColors=
color[subset1|subset2],col=pal , na.color= “grey”, key=FALSE , symkey =
FALSE , tracecol =“black” , main =“” , dendrogram= ‘both’ , scale =
“row” ,cexRow=0.2)
  heatmap.2(data[apriori,subset1|subset2] , labRow =
row.names(data[apriori,subset1|subset2]), trace=“none” , labCol =“” ,
ColSideColors= color[subset1|subset2],col=pal , na.color= “grey”,
key=FALSE , symkey =FALSE , tracecol = “black” , main =“” ,
dendrogram= ‘both’ , scale =“row”)
  svmfac <-
factor(rep(‘rest’,ncol(data)),levels=c(group1,group2,‘rest’))
  svmfac[subset1] <- group1
  svmfac[subset2] <- group2
  svmResAll <- svmLOOvalues(data[,subset1|subset2] ,
factor(as.character(svmfac[subset1|subset2]),levels=c(group1,group2)))
  svmResApriori <- svmLOOvalues(data[apriori,subset1|subset2] ,
factor(as.character(svmfac[subset1|subset2]),levels=c(group1,group2)))
    ROCplot(svmResAll , sensspecnumber=4)
    ROCplot(svmResApriori , sensspecnumber=4)
write(“” , file=outputfiletxt , append=TRUE)
    write(“All proteins” , file=outputfiletxt , append=TRUE)
    write(“” , file=outputfiletxt , append=TRUE)
    for (i in 1:5){write.table(svmResAll[[i]], file=outputfiletxt ,
append=TRUE, sep=“\t” , quote=FALSE)
                      write( “” , file=outputfiletxt , append=TRUE)
    }
    write(“” , file=outputfiletxt , append=TRUE)
    write(“Apriori proteins” , file=outputfiletxt , append=TRUE)
    write(“” , file=outputfiletxt , append=TRUE)
    for (i in 1:5){write.table(svmResApriori[[i]], file=outputfiletxt ,
append=TRUE, sep=“\t” , quote=FALSE)
                      write( “” , file=outputfiletxt , append=TRUE)
    }
    dev.off( )
}
AnalyseraMAA(“I+II”,“non-cancer”)
```

TABLE 6
ROC-AUCs for (example signature 1)

| Order of | | | Uniprot | | Publication | Signature | ROC- |
|---|---|---|---|---|---|---|---|
| elimination | smallestErrorPerLength | Antibody | entry ID | Full antigen name | name | length | AUC |
| 336 | NA | Prop-3 | P27918 | Properdin | Properdin | 1 | NA |
| 335 | 68.227384 | VEGF-3 | P15692 | Vascular endothelial growth factor | VEGF (3) | 2 | 0.84 |
| 334 | 56.359648 | C1q-4 | P02745/6/7 | Complement C1q | C1q | 3 | 0.89 |
| 333 | 52.20471 | IL-11-45 | P20809 | Interleukin-11 | IL-11 (3) | 4 | 0.89 |
| 332 | 50.36022 | JAK3 | P52333 | Tyrosine-protein kinase JAK3 | JAK3 | 5 | 0.89 |
| 331 | 47.573241 | ICAM-1 | P05362 | Intercellular adhesion molecule 1 | ICAM-1 | 6 | 0.92 |
| 330 | 48.842061 | IL-12-39 | P29459/60 | Interleukin-12 | IL-12 (1) | 7 | 0.91 |
| 329 | 45.823312 | C-AKT3-1 | Q9Y243 | RAC-gamma serine/threonine-protein | PKB gamma | 8 | 0.92 |
| | | | | kinase | (1) | | |
| 328 | 45.489121 | C5-9 | P01031 | Complement C5 | C5 (2) | 9 | 0.94 |
| 327 | 47.220274 | C3_016_D12 | P01024 | Complement C3 | C3 (4) | 10 | 0.92 |
| 326 | 39.899609 | C-P85A-2 | P27986 | Phosphatidylinositol 3-kinase regulatory | P85A (1) | 11 | 0.95 |
| | | | | subunit alpha | | | |
| 325 | 36.255768 | IL-6-58 | P05231 | Interleukin-6 | IL-6 (2) | 12 | 0.96 |
| 324 | 34.457063 | I-PTPRK-15 | Q15262 | Receptor-type tyrosine-protein | R-PTP-kappa | 13 | 0.96 |
| | | | | phosphatase kappa | (2) | | |
| 323 | 28.625926 | I-MAP2K6-3 | P52564 | Dual specificity mitogen-activated protein | MAPKK 6 (2) | 14 | 0.98 |
| | | | | kinase kinase 6 | | | |
| 322 | 28.699206 | I-TOPB1-1 | Q92547 | DNA topoisomerase 2-binding protein 1 | TopBP1 (1) | 15 | 0.98 |
| 321 | 26.57558 | I-PGAM5-2 | Q96HS1 | Serine/threonine-protein phosphatase | PGAM5 (2) | 16 | 0.99 |
| | | | | PGAM5, mitochondrial | | | |
| 320 | 24.772185 | I-CBPP22-3 | Q99653 | Calcineurin B homologous protein 1 | CHP1 (2) | 17 | 0.99 |
| 319 | 24.58218 | P3-16 | P15941 | Mucin-1 | MUC1 (5) | 18 | 0.99 |
| 318 | 22.865319 | IgM-3 | N/A | N/A | IgM (3) | 19 | 0.99 |

Signatures accumulate according to the order shown, e.g., the signature with three analytes comprises properdin, VEGF and C1q.

TABLE 7
ROC-AUCs for (example signature 2)

| | | | Uniprot | | | | | | |
|---|---|---|---|---|---|---|---|---|---|
| | | | entry | Publication | | Wilcoxon p- | | Signature | |
| Priority | Analyte | Antibody | ID | name | Fold change | value | Q-value | length | ROC-AUC |
| core 1 | R-PTP-O | I-PTPRO-4 | Q16827 | R-PTP-O (2) | 1.070125572 | 0.009704244 | 0.098806849 | 1 | 0.64 |
| core 2 | UBP7 | I-UBP7-10 | Q93009 | UBP7 (1) | 1.11356247 | 0.002987912 | 0.055774355 | 2 | 0.51 |
| 3 | PRD14 | I-PRD14-1 | Q9GZV8 | PRD14 (1) | 1.076408781 | 0.039871393 | 0.155799707 | 3 | 0.41 |
| 4 | GRIP-2 | I-GRIP2-5 | Q9C0E4 | GRIP-2 (5) | 1.106919962 | 0.023770038 | 0.137702289 | 4 | 0.59 |
| 5 | CHP-1 | I-CBPP22-3 | Q99653 | CHP1 (2) | 1.161203653 | 0.00065158 | 0.019911196 | 5 | 0.73 |
| 6 | MAPKK 2 | I-MAP2K2-5 | P36507 | MAPKK 2 (2) | 0.904776087 | 0.002285971 | 0.048005396 | 6 | 0.69 |
| 7 | MAPKK 6 | I-MAP2K6-4 | P52564 | MAPKK 6 (3) | 1.157809175 | 0.011922794 | 0.111279406 | 7 | 0.72 |
| 8 | R-PTP-eta | I-PTPRJ-1 | Q12913 | R-PTP-eta (1) | 1.09949869 | 0.017976981 | 0.13018673 | 8 | 0.71 |
| 9 | TopBP1 | I-TOPB1-2 | Q92547 | TopBP1 (2) | 1.071204183 | 0.112701484 | 0.268565239 | 9 | 0.73 |
| 10 | MAPK9 | I-MAPK9-5 | P45984 | MAPK9 (4) | 1.107889922 | 0.007750485 | 0.086805429 | 10 | 0.69 |
| 11 | PKB gamma | C-AKT3-1 | Q9Y243 | PKB gamma (1) | 1.061977425 | 0.048411664 | 0.171224411 | 11 | 0.68 |
| 12 | CIMS (13) | FN17-C08 | N/A | CIMS (13) | 1.10417223 | 0.00563986 | 0.073961513 | 12 | 0.74 |
| 13 | GNAI3 | I-GNAI3-6 | P08754 | GNAI3 (3) | 1.090520613 | 0.011137803 | 0.110067699 | 13 | 0.72 |
| 14 | HsMAD2 | I-MD2L1-7 | Q13257 | HsMAD2 (3) | 1.10784704 | 0.03423597 | 0.152971314 | 14 | 0.72 |
| 15 | hSpindly | I-SPDLY-2 | Q96EA4 | hSpindly (2) | 1.076228973 | 0.006156874 | 0.076618872 | 15 | 0.72 |
| 16 | R-PTP- | I-PTPRK-8 | Q15262 | R-PTP-kappa (7) | 1.074997443 | 0.182672471 | 0.350731144 | 16 | 0.73 |
| | kappa | | | | | | | | |
| 17 | STAT1 | C-STAT1-3 | P42224 | STAT1 (2) | 1.081796782 | 0.015781058 | 0.129327692 | 17 | 0.79 |
| 18 | HsHec1 | I-NDC80-3 | O14777 | HsHec1 (2) | 1.075526742 | 0.040804685 | 0.155799707 | 18 | 0.78 |
| 19 | PAR-6B | I-PARP6B-2 | Q9BYG5 | PAR-6B (1) | 1.099340103 | 0.017976981 | 0.13018673 | 19 | 0.77 |
| 20 | PGAM5 | I-PGAM5-2 | Q96HS1 | PGAM5 (2) | 1.095269092 | 0.03187375 | 0.152971314 | 20 | 0.73 |
| 21 | AGAP-2 | I-CENTG1-1 | Q99490 | AGAP-2 (1) | 1.096662882 | 0.050068011 | 0.175238039 | 21 | 0.71 |
| 22 | TENS4 | C-TENS4-1 | Q8IZW8 | TENS4 | 1.062769906 | 0.051771605 | 0.175709691 | 22 | 0.75 |
| 23 | LUM | LUM_1 | P51884 | LUM | 1.068518726 | 0.072383465 | 0.209662449 | 23 | 0.72 |
| 24 | USP-7 | I-UBP7-10 | Q93009 | UBP7 (1) | 1.11356247 | 0.002987912 | 0.055774355 | 24 | 0.72 |

Signatures accumulate according to the order shown, e.g., the signature with three analytes comprises R-PTP-O, UBP7 and PRD14.

TABLE 8
Amino acid sequences of the scFv antibodies used in the Examples

| Ab | Full protein Sequence (VH-linker-VL-tag) |
|---|---|
| IL-1α | EVQLLESGGGLVQPGGSLRLSCAASGFTFSSYAMHWVRQAPGKGLEWVSGVSWNGSRTHYADSVKGRFTISRDNSKNTLYLQMNSLRAEDTAVYYCARSSGYYSWAFDIWGQGTLVTVSSGGGGSGGGGSGGGGSQSVLT |
| (1) | QPPSASGTPGQRVTISCSGSSSNIGRNTVNWYQQLPGTAPKLLIYGNSNRPSXVPDRFSGSKSGTSASLAISGLRSEDEADYYCAAWDDSLNGWAFGGXTKLTVLGEQKLISXXXLSGSAA [SEQ ID NO: 1] |
| IL-1α | EVQLLESGGGLVQPGGSLRLSCAASGFTFSSYSMNWVRQAPGKGLEWVALISYDGSQKYYADSMKGRFTISRDNSKNTLYLQMNSLRAEDTAVYYCAKGHTSGTKAYYFDSWGQGTLVTVSSGGGGSGGGGSGGGGSQSV |
| (2) | LTQPPSASGTPGQRVTISCTGTSSNIGAGYSVHWYQQLPGTAPKLLIYGNSNRPSGVPDRFSGSKSGTSASLAISGLRSEDXADYYCQSYDSSLSGWVFGGXTKLTVLGEQKLISEEDLSGSAA [SEQ ID NO: 2] |
| IL-2 | EVQLLESGGGLVQPGGSLRLSCAASGFTFGDYAMSWVRQAPGKGLEWVSSISSRGSYIYFADSVKGRFTISRDNSKNTLYLQMNSLRAEDTAVYYCAKKKTGYYGLDAWGQGTLVTVSSGGGGSGGGGSGGGGSQSATQP |
| (1) | PSASGTPGQRVTISCTGSSSNIGAGYDVHWYQQLPGTAPKLLIYGNSNRPSGVPDRFSGSKSGTSASLAISGLRSEDEADYYCSSYAGSNNLVFGGXTKLTXLGEQKLISXXDISGSAA [SEQ ID NO: 3] |
| IL-2 | EVXXLESGGGLVQPGGSLRLSCAASGFTFGDYAMSWVRQAPGKGLEWVSSISSRGSYIYFADSVKGRFTISRDNSKNTLYLQMNSLRAEDTAVYYCAKKKTGYYGLDAWGQGTLVTVSSGGGGSGGGGSGGGGSQSVLTQ |
| (2) | PPSASGTPGQRVTISCTGSSSNIGAGYDVHWYQQLPGTAPKLLIYGNSNRPSGVPDRFSGSKSGTSASLAISGLRSEDEADYYCSSYAGSNNLVFGGXXKLTVLGEQKLISEXXLSGSAA [SEQ ID NO: 4] |
| IL-2 | EVQLLESGGGLVQPGGSLRLSCAASGFTFGDYAMSWVRQAPGKGLEWVSSISSRGSYIYFADSVKGRFTISRDNSKNTLYLQMNSLRAEDTAVYYCAKKKTGYYGLDAWGQGTLVTVSSGGGGSGGGGSGGGGSQSVLTQ |
| (3) | PPSASGTPGQRVTISCTGSSSXIGAGYDVHWYQQLPGTAPKLLIYGNSNRP [SEQ ID NO: 5] |
| IL-3 | EVQLLESGGGLVQPGGSLRLSCAASGFTFGRYTMHWVRQAPGKGLEWVSSISSSSSYIYYADSVKGRFTISRDNSKNTLYLQMNSLRAEDTAVYYCARHFFESSGGYFDYWGQGTLVIVSSGGGGSGGGGSGGGGSQSVL |
| (1) | TQPPSASGTPGQRVTISCSGSSSNIGSNTVNWYQQLPGTAPKLLIYRNNQRPSGVPDRFSGSKSGTSASLAISGLRSEDXADYYCAAWDDSLNGWVFGGXXKLTVLGEQKLISXXXLSGXAA [SEQ ID NO: 6] |
| IL-3 | EVQLLESGGGLVQPGGSLRLSCAASGFTFSSYAMSWVRQAPGKGLEWVSAISGSGGSTYYADSVKGRFTISRDNSKNTLYLQMNSLRAEDTAVYYCARGGARYDYWGQGTLVTVSSGGGGSGGGGSGGGGSQSVLTQPPS |
| (2) | ASGTPGQRVTISCSGSSSNIGSNTVNWYQQLPGTAPKLLIYDNNKRPSGVPDRFSGSKSGTSASLAISGLRSEDEADYYCQSYDNILRGVVFGGGTKLTVXEQKLISEXDLSGSAA [SEQ ID NO: 7] |
| IL-3 | EVXXXESGGGLVQPGGSLRLSCAASGFTFSSYAMSWVRQAPGKGLEWVSAISGRGEYTYYAGSVKGRFTISRDNSKNTLYLQMNSLRAEDTAVYYCATGATRFGYWGQGTLVTVSSGGGGSGGGGSGGGGSQSVLTQPPS |
| (3) | ASGTPGQRVTISCTGSSSNIGAGYGVQWYQQLPGTAPKLLIYRNNQRPSGVPDRFSGSKSGTSXSLAISGLRSEDEADYYCQSYDSSLSYSVFGGXTKLTVLGEQKLISSSDLSGSAA [SEQ ID NO: 8] |
| IL-4 | EVQLLESGGGLVQPGGSLRLSCAASGFTFSNAWMSWVRQAPGKGLEWVSSLHGGGDTFYTDSVKGRFTISRDNSKNTLYLQMNSLRAEDTAVYYCASLYGSGSYYYYYYGMDVWGQGTLVTVSSGGGGSGGGGSGGGGSQ |
| (1) | SVLTQPPSASGTPGQRVTISCSGNNSNTGNNAVNWYQQLPGTAPKLLIYDNNKRPSGVPDRFSGSKSGTSASLAISGLRSEDEADYYCCSYAGSYIWVFGGXTKLTVLGEQKLISXEXLSGSAA [SEQ ID NO: 9] |
| IL-4 | EVQLLESGGGLVQPGGSLRLSCAASGFTFSDYGMHWVRQAPGKGLEWVSGISWNGGKTHYVDSVKGQFTISRDNSKNTLYLQMNSLRAEDTAVYYCARDRGYCSNGVCYTILDYWGQGTLVTVSSGGGGSGGGGSGGGGS |
| (2) | QSVLTQPPSASGTPGQRVTISCSGSSSNIGSNTINWYQQLPGTAPKLLIYGNSNRPSGVPDRFSGSKSGTSASLAISGLRSEDEADYYCQSYDSSLSGWVFGGXTKLXVLXEQKLISXXDLSGSAA [SEQ ID NO: 10] |
| IL-5 | EVQLLESGGGLVQPGGSLRLSCAASGFTFSSYAMSWVRQAPGKGLEWVSSISSRSNYIYYSDSVKGRFTISRDNSKNTLYLQMNSLRAEDTAVYYCARNFRFFDKWGQGTLVTVSSGGGGSGGGGSGGGGSQSVLTQPPS |
| (1) | ASGTPGQRVTISCSGGSSXIGANPVSWYQQLPGTAPKLLIYGNSNRP [SEQ ID NO: 11] |
| IL-5 | EVQLLESGGGLVQPGGSLRLSCAASGFTFSSYAMSWVRQAPGKGLEWVSSISSRSNYIYYSDSVKGRFTISRDNSKNTLYLQMNSLRAEDTAVYYCARNFRFFDKWGQGTLVTVSSGGGGSGGGGSGGGGSQSVLTQPPS |
| (2) | ASGTPGQRVTISCSGGSSNIGANPVSWYQQLPGTAPKLLIYGNSNRPSGVPDRFSGSKSGTSASLAISGLRSEDEADYYCQSYDSSLSGSVFGGXTKLTVLXEQKLISEXXLSGSAA [SEQ ID NO: 12] |
| IL-5 | EVQLLESGGGLVQPGGSLRLSCAASGFTFSSYAMSWVRQPPGKGLEWVSSISSRSNYIYYSDSVKGRFTISRDNSKNTLYLQMNSLRAEDTAVYYCARNFRFFDKWGQGTLVTVSSGGGGSGGGGSGGGGSQSVLTQPPS |
| (3) | ASGTPGQRVTISCSGGSSNIGANPVSWYQQLPGTAPKLLIYGNSNRPSGVPDRFSGSKSGTSASLAISGLRSEDEADYYCQSYDSSLSGSVFGGXTKLTVLGEQKLISXEDLSGSAA [SEQ ID NO: 13] |
| IL-6 | EVQLLESGGGLVQPGGSLRLSCAASGFTFSSYGMHWVRQAPGKGLEWVSGINWNGGSTGYADSVKGRFTISRDNSKNTLYLQMNSLRAEDTAVYYCARNRGSSLYYGMDVWGQGTLVTVSSGGGGSGGGGSGGGGSQSVL |
| (1) | TQPPSASGTPGQRVTISCAGSSSNIGSKSVHWYQQLPGTAPKLLIYRNNRRPSGVPDRFSGSXSGTSKSLAIXGLRSXDXADYYCXXWDDRYNXXXFGGXTXLTVLXXQKLISXXXLSGSXXXPSSSXXLIXXGXXXXLX- |
| | XXLXFTGRXFXTX-LXXX [SEQ ID NO: 14] |
| IL-6 | EVQLLESGGGLVQPGGSLRLSCAASGFTFSNYGMHWVRQAPGKGLEWVSSITSSGDGTYFADSVKGRFTISRDNSKNTLYLQMNSLRAEDTAVYYCARAGGIAAAYAFDIWGQGTLVTVSSGGGGSGGGGSGGGGSQSVL |
| (2) | TQPPSASGTPGQRVTISCSGSSSNVGSNYVYWYQQLPGTAPKLLIYDNNKRPSGVPDRFSGSKSGTSASLAISGLRSEDEADYYCQSYDSSRWVFGGXTKLTVLGEQXLISEEXLSGSAA [SEQ ID NO: 15] |
| IL-7 | EVQLLESGGGLVQPGGSLRLSCAASGFTFSSYGMHWVRQAPGKGLEWVSGITWNSGSIGYVDSVKGRFTISRDNSKNTLYLQMNSLRAEDTAVYYCARGPSVAARRIGRHWYNWFDPWGQGTLVTVSSGGGGSGGGGSGG |
| (1) | GGSQSVLTQPPSASGTPGQRVTISCSGSSSNIGSNSVYWYQQLPGTAPKLLIYDNNKRPSGVPDRFSGSKSGTSASLAISGLRSEXXADYYCQSYDSSLSGSVFGGXXKLXVLGEQKLISEXXLSGSAA [SEQ ID |
| | NO: 16] |
| IL-7 | EVQLLESGGGLVQPGGSLRLSCAASGFTFSDYNIHWVRQPPGKGLEWVSGVSWNGSRTHYADSVKGQFTTSRDNSKNTLYLQMNSLRAEDTAVYYCARDPAMVRGVVLPNYYGLDVWGQGTLVTVSSGGGGSGGGGSGGG |
| (2) | GSQSVLTQPPSASGTPGQRVTISCTGSSSNIGAGYDVHWYQQLPGTAPKLLIYGHSNRPSGVPDRFSGSKSGTSASLAISGLRSEXXADYYCQSYDSSLSYPVFGGXTKLTVLGEQ [SEQ ID NO: 17] |
| IL-8 | EVQLLESGGGLVQPGGSLRLSCAASGFTFDDYGMSWVRQAPGKGLEWVSLISWDGGSTYYADSVKGRFTISRDNSKNTLYLQMNSLRAEDTAVYYCARDDLYGMDVWGQGTLVTVSSGGGGSGGGGSGGGGSQSVLTQPP |
| (1) | SASGTPGQRVTISCTGSSSNIGAGYDVHWYQQLPGTAPKLLIYDNNKRPSXVPDRFSGSKSGTSASLAISGLRSEDEADYYCAAWDDSLSGWVFGGXTKLTVLXEQKLISEXXLSGSAA [SEQ ID NO: 18] |
| IL-8 | EVQLLESGGGLVQPGGSLRLSCAASGFTFSSYEMNWVRQAPGKGLEWVSSISSSSSYIFYADSMKGRFTISRDNSKNTLYLQMNSLRAEDTAVYYCARNESVDPLGGQYFQHWGQGTLVTVSSGGGGSGGGGSGGGGSQS |
| (2) | VLTQPPSASGTPGQRVTISCTGSSSNIGAGYDVHWYQQLPGTAPKLLIYDNNKRPSGVPDRFSGSKSGTSASLAISGLRSEDEADYYCSAWDDNLDGPVFGGXTKLTVLXEQKLISXXXLSGSAA [SEQ ID NO: 19] |
| IL-9 | EVQLLESGGGLVQPGGSLRLSCAASGFTFSSYAMSWVRQAPGKGLEWVSSISSSSSYIYYADSVKGRFTISRDNSKNTLYLQMNSLRAEDTAVYYCTTFGHWGQGTLVTVSSGGGGSGGGGSGGGGSQSVLTQPPSASGT |
| (1) | PGQRVTISCSGSGSNIGDNSVNWYQQLPGTAPKLLIYGNNNRPSGVPDRFSGSKSGTSASLAISGLRSEDEADYYCSSYTSSSVVFGGXTKLTVLXEQKLISEXDLSGSAA [SEQ ID NO: 20] |
| IL-9 | EVQLLESGGGLVQPGGSLRLSCAASGFTFSSYGMHWVRQAPGKGLEWVAVISYDGSNKYYADSVKGRFTISRDNSKNTLYLQMNSLRAEDTAVYYCAKSPGGSPYYFDYWGQGTLVTVSSGGGGSGGGGSGGGGSQSATQ |
| (2) | PPSASGTPGQRVTISCSGSVSNIGSNVVSWYQQLPGTAPKLLIYDNNKRPS [SEQ ID NO: 21] |
| IL-9 | EVQLLESGGGLVQPGGSLRLSCAASGFTFSSYGMHWVRQAPGKGLEWVAVISYDGSNKYYADSVKGRFTISRDNSKNTLYLQMNSLRAEDTAVYYCAKSPGGSPYYFDYWGQGTLVTVSSGGGGSGGGGSGGGGSQSVLT |
| (3) | QPPSASGTPGQRVTISCSGSVSNIGSNWSWYQQLPGTAPKLLIYDNNKRPSGVPDRFSGSKSGTSASLAISGLRSEDEADYYCQSYDSSLGGWVFGGXTKLTVLGEQKLISEXDLSGSAA [SEQ ID NO: 22] |
| IL-10 | EVQLLESGGGLVQPGGSLRLSCAASGFTFRSYVMSWVRQAPGKGLEWVSAISGSGGSTYYADSVKGRFTISRDNSKNTLYLQMNSLRAEDTAVYYCARGKGRWAFDIWGQGTLVTVSSGGGGSGGGGSGGGGSQSVLTQP |
| (1) | PSASGTPGQRVTISCTGSSSNVGAGYDVHWYQQLPGTAPKLLIYRNNQRPSGVPDRFSGSKSGTSASLAISGLRSXDXADYYCAAWDDSLSAHVVFGGXTKLTVLGEQKLISXXDLSGSAA [SEQ ID NO: 23] |
| IL-10 | EVQLLESGGGLVQPGGSLRLSCAASGFTFRSYVMSWVRQAPGKGLEWVNSAISGSGGSTYYADSVKGRFTISRDNSKNTLYLQMNSLRAEDTAVYYCARGKGRWAFDIWGQGTLVTVSSGGGGSGGGGSGGGGSQSVLTQ |
| (2) | PPSASGTPGQRVTISCTGSSSNVGAGYDVHWYQQLPGTAPKLLIYRNNQRPSGVPDRFSGSKSGTSASLAISGLRSEDEADYYCAAWDDSLSAHVVFGGXTKLTVLGEQKLISEXDLSGSAA [SEQ ID NO: 24] |
| IL-10 | EVQLLESGGGLVQPGGSLRLSCAASGFTFSSYAMSWVRQAPGKGLEWVSAISGSGGSTYYADSVKGRFTISRDNSKNTLYLQMNSLRAEDTAVYYCARGKGRWAFDIWGQGTLVTVSSGGGGSGGGGSGGGGSQSVLTQP |
| (3) | PSASGTPGQRVTISCTGSSSNIGAGYGVHWYQQLPGTAPKLLIYGNSNRPSGVPDRFSGSKSGTSASLAISGLRSEDXADYYCAAWDDSLSGLVFGGXTKLTVLXEQKLISEXXLSGSAA [SEQ ID NO: 25] |
| IL-11 | EVQLLESGGGLVQPGGSLRLSCAASGFTFSNFGMHWVRQAPGKGLEWVAFIRYDGSNKYYADSVKGRFTISRDNSKNTLYLQMNSLRAEDTAVYYCARHYYYSETSGHPGGFDPWGQGTLVTVSSGGGGSGGGGSGGGGS |
| (1) | QSVLTQPPSASGTPGQRVTISCSGSSSNIGSYPVNWYQQLPGTAPKLLIYGNSNRPSGVPDRFSGSKSGTSASLAISGLRSEDEADYYCQXWGTGVFGGXTKLTVLGEQKLISKEXLSGSAA [SEQ ID NO: 26] |
| IL-11 | EVQLLESGGGLVQPGGSLRLSCAASGFTFSSYGMHWVRQAPGKGLEWVAVISYDGSNKYYADSVKGRFTISRDNSKNTLYLQMNSLRAEDTAVYYCARHYYDVSYRGQQDAFDIWGQGTLVTVSSGGGGSGGGGSGGGGS |
| (2) | QSVLTQPPSASGTPGQRVTISCTGSSSNLGSPYDVHWYQQLPGTAPKLLIYRNDQRASGVPDRFSGSXSGTSASLAISGLRSEDEADYYCAAWDDSLNAWVFGGXTKLTVLGEQKLISEXXLSGSAA [SEQ ID NO: |
| | 27] |
| IL-11 | EVQLLESGGGLVQPGGSLRLSCAASGFTFSDYYMSWIRQAPGKGLEWVAYISGISGYTNYADSVRGRFTISRDNSKNTLYLQMNSLRAEDTAVYYCAKSKDWVNGGEMDVWGQGTLVTVSSGGGGSGGGGSGGGGSQSVL |
| (3) | TQPPSASGTPGQRVTISCTGSSNIGAGYVVHWYQQLPGTAPKLLIYSNNQRPSGVPDRFSGSKSGTSASLAISGLRSEDEADYYCAAWDDSLRGWVFGGXTKLTVLGEQKLISEEDLSGSAA [SEQ ID NO: 28] |
| IL-12 | EVQLLESGGGLVQPGGSLRLSCAASGFTFSSYSMNWVRQAPGKGLEWVSAIGTGGGTYYADSVKGRFTISRDNSKNTLYLQMNSLRAEDTAVYYCARAFRAFDIWGQGTLVTVSSGGGGSGGGGSGGGGSQSVLTQPPSA |
| (1) | SGTPGQRVTISCSGSRSNIGNNFVSWYQQLPGTAPKLLIYGNSNRPSGVPDRFSGSKSGTSASLAISGLRSEDEADYYCAAWDDSLSGPVFGGXTKLTVLGEQKLISEXDLSGSAA [SEQ ID NO: 29] |
| IL-12 | EVQLLESGGGLVQPGGSLRLSCAASGFTFSDYYMSWVRQAPGKGLEWVSGVSWNGSRTHYADSVKGQFTISRDNSKNTLYLQMNSLRAEDTAVYYCARGSRSSPDAFDWGQGTLVTVSSGGGGSGGGGSGGGGSQSVLTQ |
| (2) | PPSASGTPGQRVTISCTGSSSNIGAGYDVHWYQQLPGTAPKLLIYGNSNRPSGVPDRFSGSKSGTSASLALSGLRSEDEADYYCAAWDDRVNGRVFGGGTKLTVLGEQKLISEXXLSGSAA [SEQ ID NO: 30] |
| IL-13 | EVQLLESGGGLVQPGGSLRLSCAASGFTFSSYSMNWVRQAPGKGLEWVSSISSGSSYIYYADSVKGRFTISRDNSKNTLYLQMNSLRAEDTAVYYCARSQGWWTYYYGMDVWGQGTLVTVSSGGGGSGGGGSGGGGSQSV |
| (1) | LTQPPSASGTPGQRVTISCSGSSSNIGSNTVNWYQQLPGTAPKLLIYSNNQRPSGVPDRFSGSKSGTSASLAISGLRSEDEADYYCETWGQ [SEQ ID NO: 31] |
| IL-13 | EVQLLESGGGLVQPGGSLRLSCAASGFTFSSYSMNWVRQAPGKGLEWVSSISSGSSYIWADSVKGRFTISRDNSKNTLYLQMNSLRAEDTAVYYCARSQGWWTYYYGMDVWGQGTLVTVSSGGGGSGGGGSGGGGSQSVL |
| (2) | TQPPSASGTPGQRVTISCSGSSSNIGSNTVNWYQQLPGTAPKLLIYSNNQRPSGVPDRFSGSKSGTSASLAISGIRSEDXADYYCETXDSNTQIFGGXTKLTVLGEQKLISEEXLSGSAXAHHHHHH- |
| | SXRXPIXXIVSXITIHXXSFXNVVTGKXXALPXXXALQHIPXXXAXXXX [SEQ ID NO: 32] |
| IL-13 | EVQLLESGGGLVQPGGSLRLSCAASGFTFSSYSMNWVRQAPGKGLEWVSSISSGSSYIYYADSVKGRFTISRDNSKNTLYLQMNSLRAEDTAVYYCARSQGWWTYYYGMDVWGQGTLVTVSSGGGGSGGGGSGGGGSQSV |
| (3) | LTQPPSASGTPGQRVTISCSGSSSNIGSNTVNWYQQLPGTAPKLLIYSNNQRPSGVPDRFSGSKSGTSASLAISGLRSEDEADYYCETWDSNTQIFGGXTKLTVLGEQKLISEXDLSGSAA [SEQ ID NO: 33] |
| VEGF | EVQLLESGGGLVQPGGSLRLSCAASGFTFSSNEMSWIRQAPGKGLEWVSSISGSGGFTYYADSVKGRYTISRDNSKNTLYLQMNSLRAEDTAVYYCARETTVRGNAFDIWGQGTLVTVSSGGGGSGGGGSGGGGSQSVLT |
| (1) | QPPSASGTPGQRVTISCTGGSSNIGAGYDVHWYQQLPGTAPKLLIYRNNQRPSGVPDRFSGSXSGTSASLAISGLFRSEDEADYYCAAWDDSLSVPMFGGXTKLTVLGEQKLISEXDLSGSAA [SEQ ID NO: 34] |
| VEGF | EVQLLESGGGLVQPGGSLRLSCAASGFTFSSYSMNWVRQAPGKGLEWVSGINWNGGSTGYADSVKGRFTISRDNSKNTLYLQMNSLRAEDTAVYYCASSVGGWYEGDNWFDPWGQGTLVTVSSGGGGSGGGGSGGGGSQS |
| (2) | VLTQPPSASGTPGQRVTISCTGSSSNIGAGYDVHWYQQLPGTAPKLLIYGNSNRPSXVPDRFSGSKSGTSASLAISGLRSEXEADYYCQSYDGSLSGSVFGGXTKLTVLGEXKLISEXXLSGSAA [SEQ ID NO: 35] |
| TGF- | EVQLLESGGGLVQPGGSLRLSCAASGFTFSTYAMSWVRQAPGKGLEWVAVVSIDGGTTYYGDPVKGRFTISRDNSKNTLYLQMNSLRAEDTAVYYCTRGPTLTYYFDYWGQGTLVTVSSGGGGSGGGGSGGGGSQSVLTQ |
| β1 (1) | PPSASGTPGQRVTISCSGSSSNIGSNTVNWYQQLPGTAPKLLIYSNNQRPSGVPDRFSGSKSGTSASLAISGLRSEDEADYYCQSYDSSLSGWVFGGXTKXVLGEQKLISEEDLSGSAA [SEQ ID NO: 36] |
| TGF- | EVQLLESGGGLVQPGGSLRLSCAASGFTFGDYAMSWFRQAPGKGLEWVSGVSWNGSRTHYADSVKGRFTISRDNSKNTLYLQMNSLRAEDTAVYYCARDGNRPLDYWGQGTLVTVSSGGGGSGGGGSGGGGSQSVLTQPP |
| β1 (2) | SASGTPGQRVTISCTGSSSNIGAGYDVHWYQQLPGTAPKLLIYGNSNRPSGVPDRFSGSKSGTSASIAISGLRSEDEADYYCAAWDDRLNGWVFGGGTKLXVLGEQKLISEXDLSGSAA [SEQ ID NO: 37] |
| TGF- | EVQLLESGGGLVQPGGSLRLSCAASGFTFSDYYIGWIRQAPGKGLEWVSGINWNGGSTGYADSVKGRFTISRDNSKNTLYLQMNSLRAEDTAVYYCARRSTPSSSWALPDFFDYWGQGTLVTVSSGGGGSGGGGSGGGGS |
| β1 (3) | QSVLTQPPSASGTPGQRVTISCTGSSSNIGANYDVHWYQQLPGTAPKLLIYSNNQRPSGVPDRFSGSKSGTSASLAISGLRSEDXADYYCQSYDSSLSGWVFGGXTKLTVLGEQKLISXXXLSGSAA [SEQ ID NO: |
| | 38] |
| TNF-α | EVQLLEGGGLVQPGGSLRLSCAASGFTFDDYGMSWVRQAPGKGLEWVAVISYDGSNKYYADSVKGRFTISRDNSKNTLYLQMNSLRAEDTAVYYCTRHLGSAMGYWGQGTLVTVSSGGGGSGGGGSGGGGSQSVLTQPPS |
| (1) | ASGTPGQRVTISCTGSSSNIGAGYDVHWYQQLPGTAPKLLIYGNSNRPSXPDRFSGSXSGTSASLAISGLRSEDEADYYCQSYDSSLSGWVFGGXTKLTVLXEQKLLSXXDLSGSAA [SEQ ID NO: 39] |
| TNF-α | EVQLLESGGGLVQPGGSLRLSCAASGFTFSSYGMHWVRQAPGKGLEWVSAISGSGGSTYYADSVKGRFTISRDNSKNTLYLQMNSLRAEDTAVYYCARGGWGPRSAFDIWGQGTLVTVSSGGGGSGGGGSGGGGSQSVLT |
| (2) | QPPSASGTPGQRVTISCSGSSSNIGSNTVTWYQQLPGTAPKLLIYGNTNRLSGVPDRFSGSKSGTSASIALSGLRSEDEADYYCEAWDDKLFGPVFGGXTXLTVLXEQKLISEXXLSGSAA [SEQ ID NO: 40] |
| TNF-α | EVQLLESGGGLVQPGGSLRLSCAASGFTFSSYWMSWVRQAPGKGLEWVSGVNWNGSRTHYADSVKGRFTISRDNSKNTLYLQMNSLRAEDTAVYYCASIRANYYYGMDVWGQGTLVTVSSGGGGSGGGGSGGGGSQSVLT |
| (3) | QPPSASGTPGQRVTISCSGGSSNIGSHPVNWYQQLPGTAPKLLIYGNSNRPSGVPDRFSGSKSGTSASLAISGLRSEDEADYYCAAWDASLSGWVFGGGXKLTVLXEXKLISXXXLSGSAA [SEQ ID NO: 41] |
| GM- | EVQLLESGGGLVQPGGSLRLSCAASGFTFSSYGMHWVRQAPGKGLEWVAVISYDGSNKYYADSVKGRFTISRDNSKNTLYLQMNSLRAEDTAVYYCARVGGMSAPVDYWGQGTLVTVSSGGGGSGGGGSGGGGSQSVLTQ |
| CSF | PPSASGTPGQRVTISCSGSSSNIGSNTVNWYQQLPGTAPKLLIYDNNKRPSGVPDRXSGSKSGTSASLAISGLRSEDEADYYCAAWDDSLIGLVVFGGXTKLTVLGEQKLISEXXLSGSAA [SEQ ID NO: 42] |
| (1) | |
| GM- | EVQLLESGGGLVQPGGSLRLSCAASGFTFSSYAMSWVRQAPGKGLEWVAVISYDGSNEDSADSVKGRFTISRDNSKNTLYLQMNSLRAEDTAVYYCARGPSLRGVSDYWGQGTLVTVSSGGGGSGGGGSGGGGSQSVLTQ |
| CSF | PPSASGTPGQRVTISCTGSSSNIGAGYDVHWYQQLPGTAPKLLIYNDNQRPSXVPDRFSGSKSGTSASLAISGLRSEDEADYYCQTWGTGINVIFGGXTKLXVLGEQKLISXEDLSGSAA [SEQ ID NO: 43] |
| (2) | |
| GM- | EVQLLESGGGLVQPGGSLRLSCAASGFTFSSYAMSWVRQAPGKGLEWVAVISYDGSNEDSADSVKGRFTISRDNSKNTLYLQMNSLRAEDTAVYYCARGPSLRGVSDYWGQGTLVTVSSGGGGSGGGGSGGGGSQSVLTQ |
| CSF | PPSASGTPGQRVTISCTGSSSNIGAGYDVHWYQQLPGTAPKLLIYNDNQRPSGVPDRFSGSKSGTSASLAISGLRSEDXADYYCQTWGTGINVIFGGXKLTVLGEXKLISEXXLSGSAA [SEQ ID NO: 44] |
| (3) | |
| TNF-β | EVQLLESGGGLVQPGGSLRLSCAASGFTFSSFAMNWVRQAPGKGLEWVSAISGSGGSTYYADSVKGRFTISRDNSKNTLYLQMNSLRAEDTAVYYCASRSTLYYYYGMDVWGQGTLVTVSSGGGGSGGGGSGGGGSQSVL |
| (1) | TQPPSASGTPGQRVTISCSGSTSNIGNSHVYWYQQLPGTAPKLLIYGNSNRPSXVPDRFSGSXSGTSASLAISGLRSEDEADYYCSSXAGSNNLVFGGXTKLTVLGEQKLISXXDLSGSAA [SEQ ID NO: 45] |
| TNF-β | EVQLLESGGGLVQPGGSLRLSCAASGFTFSSYAMSWVRQAPGKGLEWVSAISGSGGSTYYADSVKGRFTISRDNSKNTLYLQMNSLRAEDTAVYYCARSPYYGMDVWGQGTLVTVSSGGGGSGGGGSGGGGSQSVLTQPP |
| (2) | SASGTPGQRVTISCTGSSSNIGAGYDVHWYQQLPGTAPKLLIYRNDQRPSGVPDRFSGSKSGTSASLAISGLRSEDEADYYCSSYGGRDNVVFGGXTKLTVLXEQKLISXXXLSGSAA [SEQ ID NO: 46] |
| IL-1ra | EVQLLESGGGLVQPGGSLRLSCAASGFTFDTHWMSWVROAPGKGLEWVSAISGSGGSTYYADSVKGRMSRDNSKNTLYLQMNSLRAEDTAVYYCARHDYGDYRAFDIWGQGTLVTVSSGGGGSGGGGSGGGGSQSVLTQP |
| (1) | PSASGTPGQRVTISCTGSSSNIGAGYVVHWYQQLPGTAPKLLIYGNNNRPSGVPDRFSGSKSGTSASLAISGLRSEDEADYYCQSYDSSLSGVVFGGXTKLXVLXEQKLISXEDLSGSAA [SEQ ID NO: 47] |
| IL-1ra | EVQLLESGGGLVQPGGSLRLSCAASGFTFSKYAMTWVRQAPGKGLEWVSAISGSGGNTYYADSVKGRFTISRDNSKNTLYLQMNSLRAEDTAVYYCARLVRGLYYGMDVWGQGTLVTVSSGGGGSGGGGSGGGGSQSVLT |
| (2) | QPPSASGTPGQRVTISCSGSSSNIGNNAVNWYQQLPGTAPKLLIYGNSNRPSGVPDRFSGSKSGTSASLAISGLRSXDEADYYCQTXGTGPVVFGGXTKLTVLGEQKLISXXXXSGSAA [SEQ ID NO: 48] |
| IL-1ra | EVQLLESGGGLVQPGGSLRISCAVSGFTFSSYSMNWVRQAPGKGLEWVAGIGGRGATTYYVDSVKGRFTISRDNSKNTLYLQMNSLRAEDTAVYYCARLRVVPAARFDYWGQGTLVTVSSGGGGSGGGGSGGGGSQSVLT |
| (3) | QPPSASGTPGQRVTISCSGSSSNIGSNTVNWYQQLPGTAPKLLIYGNSNRPSGVPDRFSGSKSGTSASLAISGLRSEDEADYYCQSYDSSLSGPPWVFGGXXKLXVLXEQKLISEEDLSGSAA [SEQ ID NO: 49] |
| IL-16 | EVQLLESGGGLVQPGGSLRLSCAASGFTFSNHAMSWVROAPGKGLEWVSGVSWNGSRTHYADSVKGRFTISRDNSKNTLYLQMNSLRAEDTAVYYCARAALVQGVKHAFEIWGQGTLVTVSSGGGGSGGGGSGGGGSQSV |
| (1) | LTQPPSASGTPGQRVTISCSGSSSNIGSMTVNWYQQLPGTALKLLIYRNNQRPSGVPDRFSGSKSGTSASLAISGLRSEDEADYYCASWDDRLSGLVFGGXTKLTVLGEQKLISEXDISGSAA [SEQ ID NO: 50] |
| IL-16 | EVQLLESGGGLVQPGGSLRLSCAASGFTFSNHAMSWVRQAPGKGLEWVSGVSWNGSRTHYADSVKGRFTISRDNSKNTLYLQMNSLRAEDTAVYYCARAALVQGVKHAFEIWGQGTLVTVSSGGGGSGGGGSGGGGSQSV |
| (2) | LTQPPSASGTPGQRVTISCSGSSSNIGSNTVNWYQQLPGTALKLLIYRNNQRPSGVPDRFSGSXSGTSASLAISGLRSEXEADYYCASWDDRLSGLVFGGXTKLTVLXEQKLISEEDLSGSAA [SEQ ID NO: 51] |
| IL-18 | EVQLLESGGGLVQPGGSLRLSCAASGFTFSSYGMHWVRQAPGKGLEWVSGINWNGGSTGYADSVKGRFTISRDNSKNTLYLQMNSLRAEDTAVYYCARDLRGGRFDPWGQGTLVTVSSGGGGSGGGGSGGGGSQSVLTQP |
| (1) | PSASGTPGQRVTISCTGSSSNIGAGYVVHWYQQLPGTAPKLLIYRNNQRPSGVPDRFSGSXSGTSASLAISGLRSEDEADYYCSSXAGSKNLIFGGXTKLTVLGEQKLISXXXLSGSAA [SEQ ID NO: 52] |
| IL-18 | EVQLLESGRGLVQPGGSLRLSCAASGFTFSSYGMHWVRQAPGKGLEWVSAIGTGGDTYYADSVMGRFTISRDNSKNTLYLQMNSLRAEDTAVYYCARSPRRGATAGTFDYWGQGTLVTVSSGGGGSGGGGSGGGGSQSVL |
| (2) | TQPPSASGTPGQRVTISCSGSSSNIGSNIVNWYQQLPGTAPKLLIYRNNQRPSGVPDRFSGSKSGTSASLAISGLRSEDEADYYCXSYDNSLSGWVFGGXXKLXVLGEXKLISEXDLSGSAA [SEQ ID NO: 53] |
| MCP- | EVQLLESGGGLVQPGGSLRLSCAASGFTFSSYGMHWVRQAPGKGLEWVSGISWNGGKTHYVDSVKGQFTISRDNSKNTLYLQMNSLRAEDTAVYYCARGGYSSGWAFDYWGQGTLVTVSSGGGGSGGGGSGGGGSQSVLT |
| 4 (1) | QPPSASGTPGQRVTISCSGRSSNIESNTCNWYQQLPGTAPKLLIYGNSNRPSGVPDRFSGSKSGTSASLAISGLRSEDEADYYCAAWDDRLNAVVFGGXTKLTVLGEQKLISEXDLSGSAA [SEQ ID NO: 54] |
| IFN-γ | EVQLLESGGGLVQPGGSLRLSCAASGFTFSSYGMHWVRQAPGKGLEWVSGVSWNGSRTHYADSVKGRFTISRDNSKNTLYLQMNSLRAEDTAVYYCARGRTGHGWKYYFDLWGQGTLVTVSSGGGGSGGGGSGGGGSQSV |
| (1) | LTQPPSASGTPGQRVTISCSGSSSNIGNNAVNWYQQLPGTAPKLLIYGNSNRPMPDRFSGSXSGTSASLAISGLRSEDEADYYCQXWGTGLGVFGGXTKLTVLGEXKLISEEXLSGSAA [SEQ ID NO: 55] |
| IFN-γ | EVQLLESGGGLVQPGGSLRLSCAASGFTFSRHGFHWVRQGPGKGLEWVSGVSWNGSRTHYADSVKGRFTISRDNSKNTLYLQMNSLRAEDTAVYYCARGNWYRAFDIWGQGTLVTVSSGGGGSGGGGSGGGGSQSVLTQP |
| (2) | PSASGTPGQRVTISCSGGSSHIGRNFISWYQQLPGTAPKLLIYAGNSRP [SEQ ID NO: 56] |
| IL-1β | EVQLLESGGGLVQPGGSLRLSCAASGFTFSSYAMSWVRQAPGKGLEWVSYISSSGSTIYYADSVKGRSTISRDNSKNTLYLQMNSLRAEDTAVYYCARVRQNSGSYAYWGQGTLVTVSSGGGGSGGGGSGGGGSQSVLTQ |
| (1) | PPSASGTPGQRVTISCTGTSSNIGAPYDVHWYQQLPGTAPKLLIYGNSNRPSGVPDRFSGSKSGTSASLAISGLRSEDXADYYCQSYDSSLSAVVFGGXTKLTVLGEQKLISEXXLSGSAA [SEQ ID NO: 57] |
| IL-1β | EVQLLESGGGLVQPGGSLRLSCAASGFTFSRYVMTWVRQAPGKGLEWVSLISGGGSATYYADSMKGRFTISRDNSKNTLYLQMNSLRAEDTAVYYCAKRVPYDSSGYYPDAFDIWGQGTLVTVSSGGGGSGGGGSGGGGS |
| (2) | QSVLTQPPSASGTPGQRVTISCTGSSSNIGAGYDVHWYQQLPGTAPKLLIYGNSNRPSGVPDQFSGSKSGTSASLAISGLRSEDEADYYCAAWDDSLNGPVFGGXTXLTXLXEQKLISEEXLSGSAA [SEQ ID NO: |
| | 58] |
| IL-1β | EVQLLESGGGLVQPGGSLRLSCAASGFTFSSYWMSWVRQAPGKGLEWVAVVSYDGNNKYYADSRKGRFTISRDNSKNTLYLQMNSLRAEDTAMYYCASYWYTSGVVYPYGMDVWGQGTLGTVSSGGGGSGGGGSGGGGSQ |
| (3) | SVLTQPPSASGTPGQRVTISCTGSSSNIGAGYDLHWYQQLPGTAPKLLIYRNNQRPSGVPDRFSGSKSGTSASLAISGLRSEDEADYYCSSYVDNNNLVFGGXTKLTVLXEQKLISEXXLSGSAA [SEQ ID NO: 59] |
| Eotaxin | EVQLLESGGGLVQPGGSLRLSCAASGFTFSSYWMSWVRQAPGKGLEWVSGVSWNGSRTHYADSVKGRFTISRDNSKNTLYLQMNSLRAEDTAVYYCVKGKGTIAMPGRARVGWWGQGTLVTVSSGGGGSGGGGSGGGGSQ |
| (1) | SVLTQPPSASGTPGQRVTISCSGSSSNIGNNAVNWYQQLPGTAPKLLIYANSNRPSGVPDRFSGSXSGTSASLAISGLRSEDEADYYCAAWDDSLSGPVFGGXTKLTVLGEQKLISXXDLSXSAA [SEQ ID NO: 60] |
| Eotaxin | EVQLLESGGGLVQPGGSLRLSCAASGFTFSAYWMTWVRQAPGKGLEWVSVIYSGGSTYYADSVKGRFTISRDNSKNTLYLQMNSLRAEDTAVYYCARQTQQEYFDYWGQGTLVTVSSGGGGSGGGGSGGGGSQSVLTQPP |
| (2) | SASGTPGQRVTISCFGSNSNIGSSTVNWYQQLPGTAPKLIIYDNDKRPSGVPDRFSGSXSGTSASLAISGLRSEDEADYYCAAWDDSLNGPVFGGXTKLTVLGEQKLISXXXLSGSXAAHHHHHH- |
| | SPRXPIRPIVSXXTIHWPSFYNVXTGKXXXLPNXIXXXHIPLSPAXXIXXXPXXXXX [SEQ ID NO: 61] |
| Eotaxin | EVQLLESGGGLVQPGGSLRLSCAASGFTFRGYAMSWVRQAPGKGLEWVSGVSWNGSRTHYADSVKGRFTISRDNSKNTLYLQMNSLRAEDTAVYYCARAPAVAGWFDPWGQGTLVTVSSGGGGSGGGGSGGGGSQSVLTQ |
| (3) | PPSASGTPGQRVTISCSGSSSNIGSHTVNWYQQLPGTAPKLLIYRNNQRPSGVPDRFSGSKSGTSASLAISGLRSEDXADYYCAAWDDSLSGRVXGGGXKLTVLGEQKLISEEDLSGSAA [SEQ ID NO: 62] |
| RANTES | EVQLLEGGGLVQPGGSLRLSCAASGFTFSSYGMHWVRQAPGKGLEWVAVISNDGTKKDYADSVKGRFTISRDNSKNTLYLQMNSLRAEDTAVYYCARDASGYDDYYFDYWGQGTLVTVSSGGGGSGGGGSGGGGSQSVLT |
| (1) | QPPSASGTPGQRVTISCTGSSSNIGAGSDVHWYQQLPGTAPKLLIYRDDQRSSGVPDRFSGSKSGTSAFLAISGLRSEDEADYYCQSYDNSLSGWVFGGXTKLTVLGEQKLISEXXLSGSAA [SEQ ID NO: 63] |
| RANTES | EVQLLESGGGLVQPGGSLRLSCAASGFTFSSYAMSWVRQAPGKGLEWVSAISGSGGSTYYADSVKGRFTISRDNSKNTLYLQMNSLRAEDTAVYYCARDNDYSSDTFDYWGQGTLVTVSSGGGGSGGGGSGGGGSQSVLT |
| (2) | QPPSAFGTPGQRVTISCSGSSSNIGSDYVYWYQQLPGTAPKLLIYSDNQRP [SEQ ID NO: 64] |
| RANTES | EVQLLESGGGLVQPGGSLRLSCAASGFTFSNYGMNWVRQAPGKGLEWVSGVSWNGSRTHYVDSVKRRFTISRDNSKNTLYLQMNSLRAEDTAVYYCARPRLRSHNYYGMDVWGQGTLVTVSSGGGGSGGGGSGGGGSQSV |
| (3) | LTQPPSASGTPGQRVTISCSGSSFKSGKNYVSWYQQLPGTAPKLLIYRNNQRPSGVPDRFSGSKSGTSASLAISGLIISEDEADYYCAAWDVRVKGVIFGGXTKLTVLGEQKLISEXDLSGSAA [SEQ ID NO: 65] |
| MCP- | EVQLLESGGGLVQPGGSLRLSCAASGFTFSSYAMSWVRQAPGKGLEWVSGVSWNGSRTHYADSVKGRFTISRDNSKNTLYLQMNSLRAEDTAVYYCARGGHQQLGQWGQGTLVTVSSGGGGSGGGGSGGGGSQSVLTQPP |
| 1 (1) | SASGTPGQRVTISCSGSSSNIGNNYVSWYQQLPGTAPKLLIYRDSRRPSGVPDRFSGSKSGTSASLAISGLRSEXEADYYCAAWDDSLKGWLFGGXTKLTVLXEQKLISEXXLSGSAA [SEQ ID NO: 66] |
| MCP- | EVQLLESGGGLVQPGGSLRLSCAASGFTFSSYAMSWVRQAPGKGLEWVSYISSSSSYTNYADSVKGRFTISRDNSKNTLYLQMNSLRAEDTAVYYCARFRYNSGKMFDYWGQGTLVTVSSGGGGSGGGGSGGGGSQSVLT |
| 1 (2) | QPPSASGTPGQRVTISCSGSSSNIGRNTVNWYQQLPGTAPKLLIYGNSNRRSGVPDRFSGSKSGTSASLAISGLRSEDEADYYCAAWDDSLSGVVFGGXTKLTVLXEQKLISEXDLSGSAA [SEQ ID NO: 67] |
| MCP- | EVQLLESGGGLVQPGGSLRLSCAASGFTFSNYGMHWVRQAPGKGLEWVAVISYDGSNKYVADSVKGRFTISRDNSKNTLYLQMNSLRAEDTAVYYCAKSHYYDTTSFDYWGQGTLVTVSSGGGGSGGGGSGGGGSQSVLT |
| 1 (3) | QPPSASGTPGQRVTISCSGSSSNIGTNPVNWYQQLPGTAPKLLIYDNNKRPSGVPDRFSGSKSGTSASLAISGLRSEDXADYYCAAWDDSLSGWFGGXTKLTVLGEQKLISXEDLSGSAA [SEQ ID NO: 68] |
| MCP- | EVQLLESGGGLVQPGGSLRLSCAASGFTFSTYGMHWVRQAPGKGLEWVSGVSWNGSRTHYVNSVKRRFTISRDNSKNTLYLQMNSLRAEDTAVYYCARVAPGSGKRLRAFDIWGQGTLVTVSSGGGGSGGGGSGGGGSQS |
| 3 (1) | VLTQPPSASGTPGQRVTISCSGSSSNIGNNAVNWYQQLPGTAPKLLIYEVSKRPPGVPDRFSGSKSGTSASLAISGLRSEDXADYYCSSYAGSSKWVFGGCTKLTVLGEQKLISEEDLSGSAA [SEQ ID NO: 69] |
| MCP- | EVQLLESGGGLVQPGGSLRLSCAASGFTLSSNYMSWVRQAPGKGLEWVSGISASGHSTHYADSGKARFTISRDNSKNTLYLQMNSLRAEDTAVYYCARGKSLAYWGQGTLVTVSSGGGGSGGGGSGGGGSQSVLTQPPSA |
| 3 (2) | SGTPGQRVTISCSGSSSNIGNNAVNWYQQLPGTAPKLLIYRNNQRPSGVPDRFSGSKSGTSASLAISGLRSEDEADYYCAAWDDSLSVVVFGGXTKLTVLGEQKLISXXXLSGSAA [SEQ ID NO: 70] |
| MCP- | EVQLLESGGGLVQPGGSLRLSCAASGFTFSIYWMSWVRQAPGKGLEWVAYIGGISNTVSYSDSVKGRFTISRDNSKNTLYLQMNSLRAEDTAVYYCAKAPGYSSGWGWFDPWGQGTLVTVSSGGGGSGGGGSGGGGSQSV |
| 3 (3) | LTQPPSASGTPGQRVTISCSGSSSNIGTNSVFWYQQLPGTAPKLLIYGNNNRPSGVPDRFSGSKSGTSASLAISGLRSEDXADYYCMIWHSSASVFGXXTKLTVLGEQKLISEXXLSGSAA [SEQ ID NO:71] |
| β- | EVQLLESGGGLVQPGGSLRLSCAASGFTFSSYAMHWVRQAPGKGLEWVAVIAYDGINEYYGDSVKGRFTISRDNSKNTLYLQMNSLRAEDTAVYYCARGGIYHGFDIWGQGTLVTVSSGGGGSGGGGSGGGGSQSVLTQP |
| galacto- | PSASGTPGQRVTISCSGSSSNIGSNYVYWYQQLPGTAPKLLIYDNHKRPSGVPDRFSGSXSGTSASLAISGLRSEDEADYYCAAWDDNSWVFGGXTKLTVLGXYKDDDDKAA [SEQ ID NO: 72] |
| sidase | |
| Angio | EVQLLESGGGLVQPGGSLRLSCAASGFTFSDHYMDWVRQAPGKGLEWVSGVSWNGSRTHYADSVKGRFTISRDNSKNTLYLQMNSLRAEDTAVYYCARDTWAYGAFDIWGQGTLVTVSSGGGGSGGGGSGGGGSQSVLTQ |
| motin | PPSASGTPGQRVTISCSGSNSNIGRNTVNWYQQLPGTAPKLLIYRDNQRPSGVPDRFSGSXSGTPASLAISGLRSEDXADYYCAAWDVSLNGWVFGGXTKLTVLGDYXDHDGDYKDHDIDXXDDDDXXAAHHHHHH- |
| (1) | SPRWXIRPIVSRITIXWXXFYXVXXXKXX [SEQ ID NO: 73] |
| Angio | EVQLLESGGGLVQPGGSLRLSCAASGFTFNDYYMTWIRQAPGKGLEWVSYISSSGSTIYYADSVKGRFTISRDNSKNTLYLQMNSLRAEDTAVYYCARERLPDVPDVWGQGTLVTVSSGGGGSGGGGSGGGGSQSVLTQP |
| motin | PSASGTPGQRVTISCSGSGSNIGTNSVSWYQQLPGTAPKLLIYFDDLLPSGVPDRFSGSKSGTSASLAISGLRSEDEADYYCAAWDDSLSGVVFGGXTKLTVLGXYKDHDGDYKDHDIDYKDDDXKAXAHHHHHH- |
| (2) | SPRXXXRXIVSXIXIHXXXFYNXXTGKTXXXXXXIXXAAXXXFXX [SEQ ID NO: 74] |
| Leptin | EVQLLESGGGLVQPGGSLRLSCAASGFTFGDFAMSWVRQAPGKGLEWVANIKQDGSVKYYVDSVKGRFTISRDNSKNTLYLQMNSLRAEDTAVYYCARFLAGFYYGMDVWGQGTLVTVSSGGGGSGGGGSGGGGSQSVLT |
| | QPPSASGTPGQRVTISCSGSDSNIGGNTVNWYQQLPGMAPKLLIYYDDLLPSGVPDRFSGSKSGTSASLAISGLRSEDEADYYCAAYDDTMNGWGFGGXTKLTVLGXYKDXDDKAA [SEQ ID NO: 75] |
| Integrin | EVQLLESGGGLVQPGGSLRLSCAASGFTFSTYNMNWVRQAPGKGLEWVSTISGSGGRTYYADSVKGRFTISRDNSKNTLYLQMNSLRAEDTAVYYCARDRVATLDAFDIWGQGTLVTVSSGGGGSGGGGSGGGGSQSVLT |
| α-10 | QPPSASGTPGQRVTISCSGSSSNIGSNSVSWYQQLPGTAPKLLIYSNNQRPSGVPDRFSGSKSGTSASLAISGLRSEDEADYYCAAWDDSLSGVVFGGXTKLTVLGEQKLISEXDLSGSAA [SEQ ID NO: 76] |
| Integrin | EVQLLESGGGLVQPGGSLRLSCAASGFTFRRDWMSWVRQVPGKGLEWVSVISGSDGSTYYADSVKGRFTISRDNSKNTLYLQMNSLRAEDTAVYYCASYSPLGNWFDSWGQGTLVTVSSGGGGSGGGGSGGGGSQSVLTQ |
| α-11 | PPSASGTPGQRVTISCTGSSSNIGAGYDVHWYQQLPGTAPKLLIYSDTYRPSGVPDRFSGSXSGTSASLAISGLRSEDEADYYCQSYDSSLXGFVVFGGXTKLTVLXEQKLISEXXLSGSAA [SEQ ID NO: 77] |
| IgM | EVQLLESGGGLVQPGGSLRLSCAASGFTFSDYYMSWIRQAPGKGLEWVSAIGSGPYYAHSVRDRFTISRDNSKNTLYLQMNSLRAEDTAVYYCARGGVEASFDYWGQGTLVTVSSGGGGSGGGGSGGGGSQSVLTQPPSA |
| (1) | SGTPGQRVTISCTGSSSNIGAGYDVHWYQQLPGTAPKLLIYGNTNRPSGVPNRFSGSKSGTSASLAISGLRSEDEADYYCQSYDNDLSGWVFGGXTKLXVLGEQKLISXXXLSGSAA [SEQ ID NO: 78] |
| LDL | EVQLLESGGGLVQPGGSLRLSCAASGFTFSDYYMSWVRQAPGKGLEWVSGVSWNGSRTHYADSVKGRFTISRDNSKNTLYLQMNSLRAEDTAVYYCARAARYSYYYYGMDVWGQGTLVTVSSGGGGSGGGGSGGGGSQSV |
| (1) | LTQPPSASGTPGQRVTISCSGSSSNIGNNAVNWYQQLPGTAPKLLIYGNDRRPSGVPDRFSGSKSGTSASLAISGLRSEDEADYYCQTWGTGRGVFGGGTKLTVLGEQKLISEXXLSGSAA [SEQ ID NO: 79] |
| LdL | EVQLLESGGGLVQPGGSLRLSCAASGFTFSNAWMSWVRQAPGKGLEWVSSISTSSNYIYYADSVKGRFTISRDNSKNTLYLQMNSLRAEDTAVYYCARVKKYSSGWYSNYAFDIWGQGTLVTVSSGGGGSGGGGSGGGGS |
| (2) | QSVLTQPPSASGTPGQRVTISCSGSSSSIGNNFVSWYQQLPGTAPKLLIYDNNKRPSXVPDRFSGSXSGTSASLAISGLRSEDXADYYCAAWDDSLNGWVFGGXTKLTVLXXYKDHDGDYXDHDIDYKDXXDKAA |
| | [SEQ ID NO: 80] |
| PSA | EVQLLESGGGLVQPGGSLRLSCAASGFTFRSYEMNWVRQAPGKGLEWVAVIGGNGVDTDYADSVKGRFTISRDNSKNTLYLQMNSLRAEDTAVYYCVREEVDFWSGYYSYGMDVWGQGTLVTVSSGGGGSGGGGSGGGGS |
| | QSVLTQPPSASGTPGQRVTISCSGSSSNIGDNFVSWYQQLPGTAPKLLIYRTNGRPSGVPDRFSGSXSGTSASLAISGLRSEDEADYYCATWDDNLNGRVVFGGXTKLTVLGDYKDXXDKAA [SEQ ID NO: 81] |
| Lewis^{x} | EVQLLESGGGLVQPGGSLRLSCAASGFTFSNYWMHWVRQAPGKGLEWVANIKEDGSEKYYVDSVKGRFTISRDNSKNTLYLQMNSLRAEDTAVYYCAREGETSFGLDVWGQGTLVTVSSGGGGSGGGGSGGGGSQSVLTQ |
| (1) | PPSASGTPGQRVTISCSGSSSNIGSNTVNWYQQLPGTAPKLLIYSNNQRPSGVPDRFSGSKSGTSASLAISGLRSEDEADYYCASWDDSLSGWVFGGXTKLTVLGDYKDDDDKAA [SEQ ID NO: 82] |
| Lewis^{x} | EVQLLESGGGLVQPGGSLRLSCAASGFTFSRYWMHWVRQAPGKGLEWVANIKPDGSEQYYADSVKGRFTISRDNSKNTLYLQMNSLRAEDTAVYYCAREGLSSGWSYGMDVWGQGTLVTVSSGGGGSGGGGSGGGGSQSV |
| (2) | LTQPPSASGTPGQRVTISCSGSNSNIGSNTVNWYQQLPGTAPKLLIYTNINRPSGVPDRFSGSKSGTSASLAISGLRSXDEADYYCATWDDSLSGWVEGGXTKLTVLGXYKDXXDKAA [SEQ ID NO: 83] |
| Lewis^{x} | EVQLLESGGGLVQSGGSLRLSCAASGFTFSSYTLHWVRQAPGKGLEYVSAISSNGGSTYVADSVKGRFTISRDNSKNTLYLQMNSLRAEDTAVYYCASDVYGDYPRGLDYWGQGTLVTVSSGGGGSGGGGSGGGGSQSVL |
| | TQPPSASGTPGQRVTISCSGTTSNIGSNYVHWYQQLPGTAPKLLIYGNNNRPSGVPDRFSGSKSGTSASLAISGLRSEDXADYYCQSYDRSLGGLRVFGGXTKLTVLXDYKXDDDKAA [SEQ ID NO: 84] |
| Sialle | EVQLLESGGGLVQPGGSLRLSCAASGFTLSSYAMSWVRQAPGKGLEWVSSISSGNSYIYYADSVKGRFTISRDNSKNTLYQMNSLRAEDTAVYYCARGRGRGGGFELWGQGTLVTVSSGGGGSGGGGSGGGGSQSVLTQP |
| x | PSASGTPGQRVTISCSGSSSNIGTYCNWYQQLPGTAPKLLIYSNNQRPSGVPDRFSGSKSGTSASLAISGLRSEXEADYYCSSNAGIDNILFGGXTKLTVLGEQKLISEXDLSGSXAAHHHHXXXXXXXXIXXXXXXXXX |
| | XXXXXXXXXLXX [SEQ ID NO: 85] |
| TM | EVQLLESGGGLVQPGGSLRLSCAASGFTFSSYGFHWVRQAPGKGLEWVSLISWDGGSTYYADSVKGRFTISRDNSKNTLYLQMNSLRAEDTAVYYCARGTWFDPWGQGTLVTVSSGGGGSGGGGSGGGGSQSVLTQPPSA |
| peptide | SGTPGQRVTISCSGSSSXIGNNAVNWYQQLPGTAPKLLIYRNNQRPSXVPDRFSGXXSGTSASLAIXGLRSEDEADYYCAAWDDSLSWVFGGXTKLTVLGDXXTMXVIIKIMTSXXXMTMXRRP [SEQ ID NO: 86] |
| Procath- | EVQLLESGGGLVQPGGSLRLSCAASGFTFSSYAMSWVRQAPGKGLEWVSSMSASGGSTYYADSVKGRFTISRDNSKNTLYLQMNSLRAEDTAVYYCARDRGSYGMDVWGQGTLVTVSSGGGGSGGGGSGGGGSQSVLTQP |
| epsin W | PSASGTPGQRVTISCSGSTSNIGSYAVNWYQQLPGTAPKLLIYGNNNRPSGVPDRFSGSXSGTSASLAISGPRSEDEADYYCAAWDDSLNGGVFGGXTKLTVLGXYKXDDDKAA [SEQ ID NO: 87] |
| BTK | EVQLLESGGGLVQPGGSLRLSCAASGFTFSNYAMSWVRQAPGKGLEWVSGINWNGGSTGYADSVKGRFTISRDNSKNTLYLQMNSLRAEDTAVYYCAKHLKRYSGSSYLFDYWGQGTLVTVSSGGGGSGGGGSGGGGSQS |
| (1) | VLTQPPSASGTPGQRVTISCSGSSSXIGSNYVYWYQQLPGTAPKLLIY [SEQ ID NO: 88] |
| Digoxin | EVQLLESGGGLVQPGGSLRLSCAASGFTFSSYAMSWVRQAPGKGLEWVAVIWHDGSKYVADSVKGRFTLSRDNSKNTLYLQMNSLRAEDTAVYYCARATGDGFDYWGQGTLVTVSSGGGGSGGGGSGGGGSQSVLTQPPS |
| | ASGTPGQRVTISCSGSSSNIGSNYVYWYQQLPGTAPKLLIYRNNQRPSGVPDRFSGSKSGTSASLAISGLRSEDEADYYCAAWDDSLNGVVFGGXTKLTVLGEQKLISXXXLSXSAA [SEQ ID NO: 89] |
| GLP-1 | EVQLLESGGGLVQPGGSLRLSCAASGFTFRSYGMHWVRQAPGKGLEWVSGLSWNSAGTGYADSVKGRFTISRDNSKNTLYLQMNSLRAEDTAVYYCAKEMGNNWDHIDYWGQGTLVTVSSGGGGSGGGGSGGGGSQSVLT |
| R | QPPSASGTPGQRVTISCTGSSSNIGAGYDVHWYQQLPGTAPKLLIYGNSNRPSGVPDRFSGSKSGTSASLAISGLRSEDEADYYCAAWDDGLSGPVFGGGTKLTXLGEQKLISEEDLSGSAA [SEQ ID NO: 90] |
| GLP-1 | EVQLLESGGGLVQPGGSLRLSCAASGFTFNSYGMHWVRQAPGKGLEWVSAISGSGGSTYYAESVKGRSTISRDNSKNTLYLQMNSLRAEDTAVYYCVTRNAVFGFDVWGQGTLVTVSSGGGGSGGGGSGGGGSQSVLTQP |
| | PSASGTPGQRVTISCTGSSSNIGAGFDVHWYQQLPGTAPKLLIYDNNKRPSGVPDRFSGSKSGTSASLAISGLRSEDEADYYCQSFDSSLSGVVFGGXTKLTVLXEQKLISXEXLSGSAA [SEQ ID NO: 91] |
| C1q | EVQLLESGGGLVQPGGSLRLSCAASGFTFDDYGMSWVRQVPGKGLEWVSAISGSGATTFYAHSVQGRFTISRDNSKNTLYLQMNSLRAEDTAVYYCARGGRGYDWPSGAFDIWGQGTLVTVSSGGGGSGGGGSGGGGSQS |
| | VLTQPPSASGTPGQRVTISCTGSSSNIGAGYDVHWYQQLPGTAPKLLIYENNKRPSXVPDRFSGSKSGTSASLAISGLRSEDXADYYCAAWDDSVNGYVVFGGTKLTVLGEQKLISEXXLSGSAAXXHHHHH- |
| | SPRWPIRPIXSRXTIXXPSFYXXXXXXTXXLPXXIXXXHXPXXXXXX [SEQ ID NO: 92] |
| C1s | EVQLLESGGGLVQPGGSLRLSCAASGFTFSSYAMSWVRQAPGKGLEWVSGVSWNGSRTHYADSVKGRFTISRDNSKNTLYLQMNSLRAEDTAVYYCARHMKAAAYVFEIWGQGTLVTVSSGGGGSGGGGSGGGGSQSVLT |
| | QPPSASGTPGQRVTISCSGSSSNIGSTAVNWYQQLPGTAPKLLIYSNNKRPSGVPDRFSGSXSGTSASLAISGLRSEDEADYYCAAWDDRLNGNVLFGGXXKLTVLXEQXLISXXXLSGSAA [SEQ ID NO: 93] |
| C3 (1) | EVQLLESGGGLVQPGGSLRLSCAASGFTFSSYAMSWVRQAPGKGLEWVSSVTGSGGGTYYADSVEGRFTISRDNSKNTLYLQMNSLRAEDTAVYYCARYRWFGNDAFDIWGQGTLVTVSSGGGGSGGGGSGGGGSQSVLT |
| | QPPSASGTPGQRVTISCSGSASNLGMHFVSWYQQLPGTAPKLLIYGNSNRPSGVPDRFSGSKSGTSASLAISGLRSEDEADYYCAAWDDTLNWVFGGXTKLTVLGEQKLISXXXLSGSAA [SEQ ID NO: 94] |
| C3 (2) | EVQLLESGGGLVQPGGSLRLSCAASGFTFSTYRMIWVRQAPGKGLEWVSSISGSNTYIHYADSVRGRFTISRDNSKNTLYLMNSLRAEDTAVYYCARDRHPLLPSGMDVWGQGTLVTVSSGGGGSGGGGSGGGGSQSVLT |
| | QPPSASGTPGQRVTISCSGSSSNIGKHPVNWYQQLPGTAPKLLIYRNDQRPSGVPDRFSGSKSGTSASLALSGLRSEDXADYYCQSYDSSLSGSWVFGGXTKLTVLGXQKLISEEDISGSAA [SEQ ID NO: 95] |
| C4 (1) | EVQLLESGGGLVQPGGSLRLSCAASGFTFSSYPMSWVRQAPGKGLEWVSTLYAGGWTSYADSVWGRFTISRDNSKNTLYLQMNSLRAEDTAVYYCARPKVESLSRYGMDVWGQGTLVTVSSGGGGSGGGGSGGGGSQSVL |
| | TQPPSASGTPGQRVTISCTGSSSNIGAGYVVHWYQQLPGTAPKLLIYDNSKRPSGVPDRFSGSKSGTSASLAISGLRSEDEADYYCQSYDSSLSGVVFGGXTKLTVLXEQKLISEXXLSGSAA [SEQ ID NO: 96] |
| C5 (1) | EVQLLEGGGLVQPGGSLRLSCAASGFTFSSYRMNWVRQAPGKGLEWVSAISGSGGSTYYADSVKGRFTISRDNSKNTLYLQMNSLRAEDTAVYYCARGGGWFSGHYYFDYWGQGTLVTVSSGGGGSGGGGSGGGGSQSVL |
| | TQPPSASGTPGQRVTISCTGATSNIGAGYDVHWYQQLPGTAPKLLIYRNNQRPSXPDRFSGSXSGTSASLAIXGLRSEDXADYYCQSYDSSLRHWVFXGXXKLTVLXEQKLISEXXLSGSXA [SEQ ID NO: 97] |
| C5 (2) | EVQLLEGGGLVQPGGSLRLSCAASGFTFSAYSMNWVRQAPGKGLEWVSGVSWNGSRTHYADSVKGRFTISRDNSKNTLYLQMNSLRAEDTAVYYCARENSGFFDYWGQGTLVTVSSGGGGSGGGGSGGGGSQSVLTQPPS |
| | ASGTPGQRVTISCTGSSSNIGSNTVNWYQQLPGTAPKLLIYGNSNRPSGVPDRFSGSKSGTSASLTISGLRSEDXADYYCAAWDDSLSGWVFGGXTKLTVLXEQKLISEEXLSGSAA [SEQ ID NO: 98] |
| C1 | EVQLLESGGGLVQPGGSLXLSCAASGFTFSDYYMSWIRQAPGKGLEWVSGISRGGEYTFYDSVKGRFTISRDNSKNTLYLQMNSLRAEDTAVYYCARDPGGLDAFDIWGQGTLVTVSSGGGGSGGGGSGGGGSQSVLTQP |
| inh. | PSASGTPGQRVTISCTGSSSNIGARYDVQWYQQLPGTAPKLLIYGNSNRPSGVPDRFSGSKSGTSASLAISGLRSEXXADYYCASWDDSLSGPVFGGXTKLTVLXEQKLISEXXISXSAA [SEQ ID NO: 99] |
| (1) | |
| Factor | EVQLLEGGCLVQPGGSLRLSCAASGFTFSSYSMNWVRQAPGKGLEWVAVISYDGRFIYYSDSVKGRFTISRDNSKNTLYLQMNSLRAEDTAVYYCARSYGGNLAMDVWGQGTLVTVSSGGGGSGGGGSGGGGSQSVLTQP |
| B (1) | SASGTPGQRVTISCTGSSNIGAGYDVHWYQQLPGTAPKLLIYDNNKRPSGVPDRFSGSNSGTSASLAISGLRSEDXADYYCAAWDDRLNGRVVFGGXTKLTVLGEQKLISEXDLSGSAA [SEQ ID NO: 100] |
| IL-12 | EVQLLESGGGLVQPGGSLRLSCAASGFTFSRYGMHWVRQAPGKGLEWVASIRGNARGSFYADSVKGRFTISRDNSKNTLYLQMNSLRAEDTAVYYCAKGDSSGWYFFDYWGQGTLVTVSSGGGGSGGGGSGGGGSQSVLT |
| (3) | QPPSASGTPGQRVTISCTGDDSXIGAGFDVHWYQQLPGTAPKLLIYGNNNRPSGVPDRFSGSGSGTSASLAISGLRSEDXADYYCQSYDTSLSGVLFGGXXKLTVLGEQKLISEXDLSGSAA [SEQ ID NO: 101] |
| IL-12 | EVQLLESGGGLVQPGGSLRLSCAASGFTFSDYGMHWVRQAPGKGLEWVSTVSGSGDNTYYADSVKGRFTISRDNSKNTLYLQMNSLRAEDTAVYYCTTTWRYWGQGTLVTVSSGGGGSGGGGSGGGGSQSVLTQPPSASG |
| (4) | TPGQRVTISCSGSSSNIGSNWNWYQQLPGTAPKLLIYGNSNRPSGVPDRFSGSKSGTSASLAISGLRSEDEADYYCQSYDSSLSGWVFGGXTKLTVLXEQKLISXEDLSGSAA [SEQ ID NO: 102] |
| IL-16 | EVXLLESGGGLVQPGGSLRLSCAASGFTFSSYGMHWVRQAPGKGLEWVSGINWNGGSTGYADSVKGRFTISRDNSKNTLYLQMNSLRAEDTAVYYCARERGDAFDIWGQGTLVTVSSGGGGSGGGGSGGGGSQSVLTQPP |
| (3) | SASGTPGQRVTISCSGSSSNIGSNTVNWYQQLPGTAPKLLIYSDNQRPSGVPDRFSGSKSGTSASLAISGLRSXXEADYYCAAWXDSLNGPWVFGGXTKLXVLGEQKLISEEDLSGSAA [SEQ ID NO: 103] |
| IL-18 | EVQLLESGGGLVQPGGSLRLSCAASGFTFSRYGMHWVRQAPGKGLEWVAVISYDGSNKYYADSVKGRFTISRDNSKNTLYLQMNSLRAEDTAVYYCARHGYGDSRSAFDIWGQGTLVTVSSGGGGSGGGGSGEGGSQSVL |
| (3) | TQPPSASGTPGQRVTISCTGSSSNIGAGYDVHWYQQLPGTAPKLLIYRNNQRPSGVPDRFSGSKSGTSASLAISGLRSEXXADYYCQSYDSSLSRWVFGGXTKLXVLGEQKLISXXXLSXSAA [SEQ ID NO: 104] |
| IL-1a | EVQLLESGGGLVQPGGSLRLSCAASGFTFSSYSMNWVRQAPGKGLEWVSYISSSSSYTNYADSVKGRFTISRDNSKNTLYLQMNSLRAEDTAVYYCARSVTRRAGYYYYYSGMDVWGQGTLVTVSSGGGGSGGGGSGGGG |
| (3) | SQSVLTQPPSASGTPGQRVTISCSGSSSXIGSNTVNWYQQLPGTAPKLLIYRNNQRPSXVPDRFSGSXSGTSASLAISGLRSEDEAXYYCSSXAGSNSXVFGGXTKLTVLGEQKLISXXXLSGSAA [SEQ ID NO: |
| | 105] |
| IL-6 | EVQLLESGGGLVQPGGSLRLSCAASGFTFSNYGMHWVRQAPGKGLEWVSSITSSDGTYFADSVKGRFTISRDNSKNTLYLQMNSLRAEDTAVYYCARAGGIAAAYAFDIWGQGTLVTVSSGGGGSGGGGSGGGGSQSVLT |
| (3) | QPPSASGTPGQRVTISCSGSSSNVGSNYVYWYQQLPGTAPKLLIYDNNKRPSGVPDRFSGSKSGTSASLAISGLRSEXEADYYCQSYDSSRWVFGGXTKLTVLGEQKLISEXXLSGSAA [SEQ ID NO: 106] |
| IL-6 | EVQLLESGGGLVQPGGSLRLSCAASGFTFSSNYMSWVRQAPGKGLEWVSSISSSSTIYYADSVKGRFTISRDNSKNTLYLQMNSLRAEDTAVYYCARQPASGTYDAFDIWGQGTLVTVSSGGGGSGGGGSGGGGSQSVLT |
| (4) | QPPSXSGTPGQRVTISCTGSSSNIGAGYDVHWYQQLPGTAPKLLIYYDDLLPSGVPDRFSGSKSGTSASLAISXLRSEDEADYYCAVWDDSLSGWVFGGXTKLTVLXEQKLISXXDLSGSAXAHHHHHHXSPRXXIRPIV |
| | SXITIXXVVLXRRDWEXPXXTQLNXXXAHXPFXXXXNX [SEQ ID NO: 107] |
| IL-8 | EVQXLESGGGLVQPGGSLRLSCAASGFTFDDYGMSWVRQAPGKGLEWVSLISWDGGSTYYADSVKGRFTISRDNSKNTLYQMNSLRAEDTAVYYCARDDLYGMDVWGQGTLVTVSSGGGGSGGGGSGGGGSQSVLTQPPS |
| (3) | ASGTPGQRVTISCTGSSSNIGAGYDVHWYQQLPGTAPKLLIYDNNKRPSGVPDRFSGSKSGTSASLAISGLRSXDEADYYCAAWDDSLSGWVFGGXTKLTVLGEQKLISEXXLSGSAA [SEQ ID NO: 108] |
| MCP- | EVQLLESGGGLVQPGGSLRLSCAASGFTFSSYGMHWVRQAPGKGLEWVSGISWNGGKTHYVDSVKGQFTISRDNSKNTLYLQMNSLRAEDTAVYYCARGGYSSGWAFDYWGQGTLVTVSSGGGGSGGGGSGGGGSQSVLT |
| 4 (3) | QPPSASGTPGQRVTISCSGRSSNIESNTVNWYQQLPGTAPKLLIYGNSNRPSGVPDRFSGSKSGTSASLAISGLRSEXEADYYCAAWDDRLNAVVFGGXTKLXVLXEQKLISEXXLSGSAA [SEQ ID NO: 109] |
| Proper- | EVQLLESGGGLVQPGGSLRLSCAASGFTFSSNYMSWVRQAPGKGLEWVSAISGSGGSTYYADSVKGRFTISRDNSKNTLYLQMNSLRAEDTAVYYCAKGGSGWYDYFDYWGQGTLVTVSSGGGGSGGGGSGGGGSQSVLT |
| din | QPPSASGTPGQRVTISCTGSSSNIGAGYDVHWYQQLPGTAPKILIYRNNQRPSGVPDRFSGSKSGTSASLAISGLRSEDEAXYYCAAXDDGLNSPVFGGGTKLXVLXEQKLISEEDLSGSAXAHHHHHH- |
| | SPRXXIRPIVSRITIHWXXFXXXXXGKTXXXPXLXXXXXXPPFX [SEQ ID NO: 110] |
| TNF-β | EVQLLESGGGLVQPGGSLRLSCAASGFTFSDYYMSWIRQAPGKGLEWVSGLSGSAGRTHYADWRGRFTISRDNSKNTLYLQMNSLRAEDTAMYYCASSLFDYWGQGTLVTVSSGGGGSGGGGSGGGGSQSVLTQPPSASG |
| (3) | TPGQRVTISCSGSSSNIGSNYVYWYQQLPGTAPKLLIYSNNQRPSGVPDRFSGSKSGTSASLAISGLRSEDXADYYCAAWDDSLNAVVFGGXTKLTVLGEQKLISEXDLSGSAA [SEQ ID NO: 111] |
| TNF-β | EVQLLESGGGLVQPGGSLRLSCAASGFTFSDYYMNWVRQAPGKGLEWVSGINWNSDDIDYVDSVKGRFTISRDNSKNTLYLQMNSLRAEDTAMYYCAIDSRYSSGWSFEYWGQGTLVTVSSGGGGSGGGGSGGGGSQSVL |
| (4) | TQPMSGTPGQRVTISCSGSTSNIGNSHVYWYQQLPGTAPKLLIYSNNQRPSGVPDRFSGSKSGTSASLAISGLRSEDEADYYCQSYDSSLSGVVFGGXTKLTVLGEOQLISXXXLSGSAA [SEQ ID NO: 112] |
| VEGF | EVQLLESGGGLVQPGGSLRLSCAASGFTFSSYEMNWVRQAPGKGLEWVSGISGSGGFTYYADSVKGRFTISRDNSKNTLYLQMNSLRAEDTAMYYCAREGYQDAFDIWGQGTLVTVSSGGGGSGGGGSGGGGSQSVLTQP |
| (3) | PSASGTPGQRVTISCTGSSSNIGAGYDVHWYQQLPGTAPKLLIYSNNQRPSXVPDRFSGSXSGTSASLAISGLRSEDXADYYCAAWDDSLSGPPWVFGGGXKLXVLXEQKLISXXXLSGSXAAHHHHHH-SPRXPIRPIV |
| | SXIXIHWPXFYNVXXXXTXXXPXLX [SEQ ID NO: 113] |
| VEGF | EVQLLESGGGLVQPGGSLRLSCAASGFTFXXXYXSWVRQAPGKGLEWVSXISWXXGSIGYADSVKGRFTISRDNSKNTLYLQMNSLRAEDTAVYYCXXXXXXXXNYFDYWGQGTLVTVSSGGGGSGGGGSGGGGSQSVLT |
| (4) | QPPSASGTPGQRVTISCSGSNSNIGGNFVYWYQQLPGTAPKLLIYENSKRPSXVPDRFSGSXSGTSASLAISGLRSEDXADYYCAAWDDSLXXVVFGGXTKLTVLGEQKLISXXXLSGSAA [SEQ ID NO: 114] |
| IL-4 | EVQLLESGGGLVQPGGSLRLSCAASGFTFSNAWMSWVRQAPGKGLEWVSAISGSGGSTYYADSVKGRFTISRDNSKNTLYLQMNSLRAEDTAVYYCARAIAARPFDYWGQGTLVTVSSGGGGSGGGGSGGGGSQSVLTQP |
| (3) | PSASGTPGQRVTISCTGATSNIGAGYDIHWYQQLPGTAPKLLIYSTNNRPSGVPDRFSGSKSGTSASLAISGLRSEDXADYYCAAWDDSLNGPVFGGXXKLTVLGEQKLISEXDLSGSAA [SEQ ID NO: 115] |
| MUC- | EVXLLESGGGLVQPGGSLRLSCAASGFTFSNYWMSWVRQAPGKGLEWVALISFDGSNKYYADSAKGRFTISRDNSKNTLYLQMNSLRAEDTAVYYCARVLAQQRMDVWGQGTLVTVSSGGGGSGGGGSGGGGSQSVLTQP |
| 1 (1) | PSASGTPGQRVTISCSGSSSNIGSNTVNWYQQLPGTAPKLLIYGNNNRPSGVPDRFSGSXSGTSASLAISGLRSED [SEQ ID NO: 116] |
| CD40 | EVQLLESGGGLVQPGGSLRLSCAASGFTFSAYWMHWVRQAPGKGLEWVSGISGGGGSTYYADSVKGRFTISRDNSKNTLYLQMNSLRAEDTAVYYCARMTPWYYGMDVWGQGTLVTVSSGGGGSGGGGSGGGGSQISMLT |
| (2) | QPPSASGTPGQRVTISCSGSTS [SEQ ID NO: 117] |
| CD40 | EVQLLESGGGLVQPGGSLRLSCAASGFTFSTYGMHWVRQAPGKGLEWLSYISGGSSYIFYADSVRGRFTISRDNSENALYLQMNSLRAEDTAVYYCARILRGGSGMDLWGQGTLVTVSSGGGGSGGGGSGGGGSQSVLTQ |
| (3) | PPXXGTPGQRVTISC [SEQ ID NO: 118] |
| CD40 | EVQLLESGGGLVQPGGSLRLSCAASGFTFSTYGMHWVRQAPGKGLEWLSYISGGSSYIFYADSVRGRFTISRDNSENALYLQMNSLRAEDTAVYYCARILRGGSGMDLWGQGTLVTVSSGGGGSGGGGSGGGGSQSVLTQ |
| (4) | PPSASGTPGQRVTISCTGSSSNIGAGYDVYWYQQLPGTAPKLLIYGNINRPSGVPDRFSGSKSGTSASLAISGLRSEDXADYYCAAWDDSLXGLVFGGXXKLTVLXXYKDDDDKAA [SEQ ID NO: 119] |
| CT17 | EVQLLESGGGLVQPGGSLRLSCAASGFTFSSSAMHWVRQAPGKGLEWVSAISGSGGSTYYADSVKGRFTISRDNSKNTLYLQMNSLRAEDTAVYYCARVKGRVTIFGVVINSNYGMDVWGQGTLVTVSSGGGGSGGGGSG |
| | GGGSQSVLTQPPSASGTPGQRVTISCSGSISSIGSNAVSWYQQLPGTAPKLLIYGNSNRPSGVPDRFSGSKSGTSASLAISGLRSEDXADYYCAAWDDSLNGHDWFGGXTKLTVLXDYKDXDXKAA [SEQ ID NO: |
| | 120] |
| IgM | EVQLLESGGGLVQPGGSLRLSCAASGFTFSSYAMSWVRQAPGKGLEWVSGISWNSGSIGYADSVKGRFTISRDNSKNTLYLQMNSLRAEDTAVYYCARGDYSSSPGGYYYYMDVWGQGTLVTVSSGGGGSGGGGSGGGGS |
| (3) | QSVLTQPPSASGTPGQRVTISCSGSSSXIGSNTVNWYQQLPGTAPKLLIYGNSNRPSXVPDRFSGXXSGTSASLAIXGLRSXDXADYYCSSXXSTNTVIFGGXTKLTVLGEQKLISXXDLSGSAA [SEQ ID NO: |
| | 121] |
| IgM | EVQLLESGGGLVQPGGSLRLSCAASGFTFSSNEMSWIRQAPGKGLEWVSAIYSGGGTYYADSVKGRFTISRDNSKNTLYLQMNSLRAEDTAVYYCARVNDYGDNVYFDHWGQGTLVTVSSGGGGSGGGGSGGGGSQSVLT |
| (4) | QPPSASGTPGQRVTISCSGSSSNIGNNYVSWYQQLPGTAPKLLIYENNKRPSXVPDRFSGSXSGTSASLAISGLRSEDEADYYCAAWDDSLSVYVVFGGXTKLXVLGEQKLISXXDLSGSAA [SEQ ID NO: 122] |
| IgM | EVQLLESGGGLVQPGGSLRLSCAASGFTFGSYEMNWVRQAPGKGLEWVSVIYSGGSTYYADSVEGRFTISRDNSKNTLYLQMNSLRAEDTAVYYCARDTNPYYYYGMDVWGQGTLVTVSSGGGGSGGGGSGGGGSQSVLT |
| (5) | QPPSASGTPGQRVTISCSGSSSNIGNNAVNWYQQLPGTAPKLLIYRNNQRPSXVPDRFSGSXSGTSASLAISGLRSEDEADYYCQSYDSSLNGQVFGGXTKLTVLXEQKLISXEXLSGSAA [SEQ ID NO: 123] |
| HLA- | EVQLLESGGGLVQPGGSLRLSCAASGFTFSSYAMSWVRQAPGKGLEWVSAISGSGGSTYYADSVKGRFTISRDNSKNTLYLQMNSLRAEDTAVYYCARDGLLPLDYWGQGTLVTVSSGGGGSGGGGSGGGGSQSVLTQPP |
| DR/DP | SASGTPGQRVTISCSGGSSNIGGNAVNWYQQLPGTAPKLLIYENNKRPSXVPDRFSGSXSGTSASLAISGLRSEDXADYYCSSYAVSNNFEVLFGGXTKLTVLXEQKLISXXDLSGSAA [SEQ ID NO: 124] |
| ICAM- | EVQLLESGGGLVQPGGSLRLSCAASGFTFSNAWMSWVRQAPGKGLEWVAFIWYDGSNKYYADSVKGRFTISRDNSKNTLYLQMNSLRAEDTAVYYCARYSGWYFDYWGQGTLVTVSSGGGGSGGGGSGGGGSQSVLTQPP |
| 1 | SASGTPGQRVTISCTGSSSXIGAGYDVHWYQQLPGTAPKLLIYDNNNRPSXVPDRFSGSXSGTSASLAISGLRSEDEADYYCQSYDSSLSAWLFGGXTKLTVLGEQKLISXXDLSGSXAAHHHHHH- |
| | SPRWPIRXIVSXXTIXXPXFYXVXXXKPXXTXLXRXXAHPXX [SEQ ID NO: 125] |
| IgM | EVQLLESGGGLVQPGGSLRLSCAASGFTFSDYYMSWIRQAPGKGLEWVSAIGSGPYYAHSVRDRFTISRDNSKNTLYLQMNSLRAEDTAVYYCARGGVEASFDYWGQGTLVWSSGGGGSGGGGSGGGGSQSVLTQPPSAS |
| (2) | GTPGQRVTISCTGSSSNIGAGYDVHWYQQLPGTAPKLLIYGNTNRPSXVPNRFSGSXSGTSASLAISGLRSEDEADYYCQSYDNDLSGWVFGGXTKLTVLGEQKLISEEXLSGSAA [SEQ ID NO: 126] |
| MUC- | EVQLLESGGGLVQPGGSLRLSCAASGFTFKNYWMSWVRQAPGKGLEWVSDISGGGGTTYIADSVKGRFTISRDNSKNTLYLQMNSLRAEDTAVYYCARIHSGSYYFDYWGQGTLVTVSSGGGGSGGGGSGGGGSQSVLTQ |
| 1 (2) | PPSASGTPGQRVTISCTGSSSNIGAGYDVHWYQQLPGTAPKLLIYKNNQRPSGVPDRFSGSKSGTSASLAIXGLRSEDEADYYCA [SEQ ID NO: 127] |
| MUC- | EVQLLESGGGLVQPGGSLRLSCAASGFTFKNYWMSWVRQTPGKGLEWVSDISGGGGTTYIADSVKGRFTISRDNSKNTLYLQMNSLRAEDTAVYYCARIHSGSYYFDYWGQGTLVTVSSGGGGSGGGGSGGGGSQSVLTQ |
| 1 (3) | PPSASGTPGQRVTISCTGSSSNIGAGYDVHWYQQLPGTAPKLLIYKNNQRPSGVPDRFSGSKSGTSASLAISGLRSEDXADYYCAAWDDSLNGPVFGGXXKLTVLXDYXDHDGDYKDHDIDYXDDDXXAA [SEQ ID |
| | NO: 128] |
| MUC- | EVQLLESGGGLVQPGGSLRLSCAASGFTFKNYWMSWVRQAPGKGLEWVSDISGGGGTTYIADSVKGRFTISRDNSKNTLYLQMNSLRAEDTAVYYCARIHSGSWFDYWGQGTLVTVSSGGGGSVGGGSGGGGSQSVLTQP |
| 1 (4) | PSASGTSGQRVTISCTGSSSNIGAGYDVHWYQQLPGTAPKLLIYKNNQRPSGVPDRFSGSXSGTSASLAISGLRSEDEADYYCAAXDDSLNGPVFGGXTKLTVLGDYKDHDGDYXDHDIDXXDXDXKAA [SEQ ID |
| | NO: 129] |
| MUC- | EVQLLESGGGLVQPGGSLRLSCAASGFTFKNYWMSWVRQAPGKGLEWVSDISGGGGTTYIADSVKGRFTISRDNSKNTLYLQMNSLRAEDTAVYYCARIHSGSYYFDYWGQGTLVTVSSGGGGSGGGGSGGGGSQSVLTQ |
| 1 (5) | PPSASGTPGQRVTISCTGSSSNIGADYDVHWYQQLPGTAPKLLIYKNNQRPSGVPDRFSGSKSGTSASLAISGLASEDXADYYCAVWDDSLNGPXFGGXTKLTVLXDYKXHDGDYKDHDIDXKDDDDKAA [SEQ ID |
| | NO: 130] |
| MUC- | EVQLLESGGGLVQPGGSLRLSCAASGFTFKNYWMSWVRQAPGKGLEWVSDISGGGGTTYIADSVKGRFTISRDNSRNTLYLQMNSLRAEDTAVYYCARIHSGSYYFDYWGQGTLVTVSSGGGGSGGGGSGGGGSQSVLTQ |
| 1 (6) | PPSASGTPGQKVTISCTGSSSNIGAGYDVHWYQQLPGTAPKLLIYKNNQRPSGVPDRFSGSRSGTSASLAISGLRSEDEADYYCAAWDDSLNGPVFGGXXKLTVLXDYXDHDGDYKDHDIDYKXXDDKAA [SEQ ID |
| | NO: 131] |
| MCP- | QSVLTQPPSASGTPGQRVTISCTGSSSNIGSDYGVQWYQQLPGTAPKLLIYSNNQRPSGVPDRFSGSKSGTSASLAISGLRSEDEADYYCAAWDDSLSGPVFGGGTKLTVLG [SEQ ID NO: 132] |
| 1 (4) | |
| MCP- | QSVLTQPASASGTPGQRVTISCTGNSSNIGAGYDVHWYQQLPGTAPKLLIYRNNQRPSGVPDRFSGSKSGTSASLAISGLLSEDEADYYCAAWDYSLNGWVFGGGTKLTVLG [SEQ ID NO: 133] |
| 1(5) | |
| MCP- | QSVLTQPSSASGTPGQRVTISCTGNSSNIGAGYDVHWYQQLPGTAPNLLIYRNNQRPSGVPDRFSGSKSGTSASLAISGLRSEDEADYYCAAWDDSLNGWVFGGGTKLTVLGQ [SEQ ID NO: 134] |
| 1 (6) | |
| MCP- | EVQLLESGGGLVQPGGSLRLSCAASGFTFSYAMSWVRQAPGKGLEWVAYINRGSTYTNYADSMKGRFTISRDNSKNTLYLQMNSLRAEDTAVYYCARRGYGSGSYYAFDIWGQGTLVTVSSGGGGSGGGGSGGGGSQSVL |
| 1 (7) | TQPPSASGTPGQRVTISCTGSSSNIGSDYGVQWYQQLPGTAPKLLIYSNNQRPSXVPDRFSGSKSGTSASLAISGLRSEDXADYYCAAWDDSLSGPVFGGX [SEQ ID NO: 135] |
| MCP- | EVQLLESGGGLVQPGGSLRLSCAASGFTFGDYAMSWVRQAPGKGLEWVAVISYDGSNKYYADSVKGRFTISRDNSKNTLYLQMNSLRAEDTAVYYCARDPDPSGTDAFDFWGQGTLVTVSSGGGGSGGGGSGGGGSQSVL |
| 1 (8) | TQPPSASGTPGQRVTISCSGSSSNIGAGYDVHWYQQLPGTAPKLLIYGNSNRPSXVPDRFSGSXSGTSASLAISGLRSEDXADYYCAAWDDSLSAWAFGG [SEQ ID NO: 136] |
| MCP- | EVQLLESGGGLVQPGGSLRLSCAASGFTFSSYEMNWVRQAPGKGLEWVSAISGPGGSTYVADSVKGRFTISRDNSKNTLYLQMNSLRAEDTAVYYCARDLSDYGDFDYWGQGTLVTVSSGGGGSGGGGSGGGGSQSVLTQ |
| 1 (9) | PPSASGTPGQRVTISCTGSSSNIGAGYDAHWYQQLPGTAPKLLIYDNNKRPXXVPDRFSGSXSGTSASLAISGLRSEDEADYYCATWDDSLRGWVFG [SEQ ID NO: 137] |
| Cystatin | EVQLLESGGGLVQPGGSLRLSCAASGFTFSSYAMNWVRQAPGKGLEWVGLISYDGRTTYYADSVKGRSTISRDNSKNTLYLQMNSLRAEDTAVYYCATTTGTTLDYWGQGTLVTVSSGGGGSGGGGSGGGGSQSVLTQPP |
| C (1) | SASGTPGQRVTISCTGSSSNIGAGYDVHWYQQLPGTAPKLLIYGNTNRPSXVPDRFSGSXSGTSASLAISGLRSEDEADYYCAAWDDSLYGWVFGGXTKLTVLGDYXDHDGDYXDHDIDXXDDDDKAA [SEQ ID NO: |
| | 138] |
| Cystatin | EVQLLESGGGLVQPGGSLRLSCAASGFTFSSYSMNWVRQAPGKGLEWVAFISYDGSNKYYVDSVKGRFTISRDNSKNTLYLQMNSLRAEDTAVYYCARDGVPAVPFDYWGQGTLVTVSSGGGGSGGGGSGGGGSQSVLTQ |
| C (2) | PPSASGTPGQRVTISCSGSSSNIGAGYDVHWYQQLPGTAPKLLIYSNNQRPS [SEQ ID NO: 139] |
| Cystatin | EVQLLESGGGLVQPGGSLRLSCAASGFTFSNYAMTWVRQAPGKGLEWVADISHDGFHKYVADSVRGRFDSRDNSKNTLYLQMNSLRAEDTAVYYCARYGRVLPYYYYYGMDVWGQGTLVTVSSGGGGSGGGGSGGGGSQS |
| C (3) | VLTQPPSASGTPRQRVTISCTGSSSXIGAGYDVHWYQQLPGTAPKLLIYGNSNRP [SEQ ID NO: 140] |
| Cystatin | EVQLLESGGGLVQPGGSLRLSCAASGFTSSYAMNWVRQAPGKGLEWVGLISYDGRTTYVADSVKGRSTISRDNSKNTLYLQMNSLRAEDTAVYYCATTTGTTLDYWGQGTLVTVSSGGGGSGGGGSGGGGSQSVLTQPPS |
| C (4) | ASGTPGQRVTISCTGSSSNIGAGYDVHWYQQLPGTAPKLLIYGNTNRPSXVPDRFSGSXSGTSXSLAISGLRSXDEADYYCAAWDDSLYGWVFGG [SEQ ID NO: 141] |
| Apo- | EVQLLESGGGLVQPGGSLRLSCAASGFTFSNNGMHWVRQAPGKGLEWVSAISASGGSTYYADSVKGRFTISRDNSKNTLYLQMNSLRAEDTAVYYCATHGGSSYDAFDIWGQGTLVTVSSGGGGSGGGGSGGGGSQSVLT |
| A1 (1) | QPPSASGTPGQRVTISCTGSSSNIGAGYVVHWYQQLPGTAPKLLIYG [SEQ ID NO: 142] |
| Apo- | EVQLLESGGGLVQPGGSLRLSCAASGFTFRDYYMSWIRQAPGKGLEWVAVTSYDGSKKYYADSVKGRFTISRDNSKNTLYLQMNSLRAEDTAVYYCAKDYADDSIAAPAFDIWGQGTLVTVSSGGGGSGGGGSGGGGSQS |
| A1 (2) | VLTQPPSASGTPGQRVTISCTGSSSXIGAGYDVHWYQQLPGTAPKLLIYGNSNRPS [SEQ ID NO: 143] |
| Apo- | EVXXLESGGGLVQPGGSLRLSCAASGFTFRDYYMSWIRQAPGKGLEWVAVTSYDGSKKYYADSVKGRFTISRDNSKNTLYLQMNSLRAEDTAVYYCAKDVADDSIAAPAFDIWGQGTLVTVSSGGGGSGGGGSGGGGSQS |
| A1 (3) | VLTQPPSASGTPGQRVTISCTGSSSNIGAGYDVHWYQQLPGTAPKLLIYGNSNRPSGVPDRFSGSKSGTSASLAISGLRSXDEAXYYCQSYDSSLSVVFGGGTKLTVLXXYXDHDGDYKDHDIDYXDDXXXAXAHHHHHH- |
| | SPXXXIRXXXSXXTIHXXXXXXXXDWXXXXXXXXX [SEQ ID NO: 144] |
| Factor | EVQLLESGGGLVQPGGSLRLSCAASGFTFSSYSMNWVRQAPGKGLEWVAVISYDGRFIYYSDSVKGRFTISRDNSKNTLYLQMNSLRAEDTAVYYCARSYGGNLAMDVWGQGTLVTVSSGGGGSGGGGSGGGGSQSVLTQ |
| B (2) | PPSASGTPGQRVTISCTGSSSNIGAGYDVHWYQQLPGTAPKLLIYDNNKRPSGVPDRFSGSNSGTSASLAISGLRSEDEADYYCAAWDDRLNGRVVFGGXTKLTVLGDYXDHDGDYKDHDIDXKDDDXKAA [SEQ ID |
| | NO: 145] |
| Factor | EVQLLESGGGLVQPGGSLRLSCAASGFTFSSYSMNWVRQAPGKGLEWVAVISYDGSNQYYSDSVRGRFTISKDNSKNTLYLQMNSLRAEDTAVYYCAREWHYSLDVWGQGTLVTVSSGGGGSGGGGSGGGGSQSVLTQPP |
| B (3) | SASGTPGQRVTISCSGSSSXIGSNTVNWYQQLPGTAPKLLIYRNNQRPSXVPDRFSGSXSGTSASLAIXGLRSEDXADYYCAAWDD [SEQ ID NO: 146] |
| Factor | EVQLLESGGGLVQPGGSLRLSCAASGFTFSKRSMNWVRQAPGKGLEWVATVSYDGNYKYYADSVKGRFTISRDNSKNTLYLQMNSLRAEDTAVYYCAREGYYYYGMDVWGQGTLVTVSSGGGGSGGGGSGGGGSQSVLTQ |
| B (4) | PPSASGTPGQRVTISCTGSSSNIGNNAVNWYQQLPGTAPKLLIYNNNQRPXXVPDRFSGSXSGTSXSLAISGLRSEDEADYYCQPYXDXLSSVVFGGXTXLTVLXDXXDHDXXYKDHDIXYXDXDXXXXAHHHHHH- |
| | SPRWPIRPIVSXIXIXWXXVLXRXXXXNXXXXXXXXXXXXHXXXXXX [SEQ ID NO: 147] |
| C1 | EVQLLESGGGLVQPGGSLRLSCAASGFTFSNAWMSWVRQAPGKGLEWVSAISGSGGSTYYADSVKGRFTISRDNSKNTLYLQMNSLRAEDTAVYYCARNRGNWGTYYFDYWGQGTLVTVSSGGGGSGGGGSGGGGSQSVL |
| inh. | TQPPSASGTPGQRVTISCSGSSSNIGSNYVSWYQQLPGTAPKLLIYGSSNRPSGVPDRFGSXSGTSASLAISGLRSEDEADYYCQSYDSSLSDHVVFGGXTKLTVLXDYXDHDGDYKDHDIDXXDDDDXAA [SEQ ID |
| (2) | NO: 148] |
| C1 | EVQLLESGGGLVQPGGSLRLSCAASGFTFSNAWKSWVRQAPGKGLEWVSAISGSGGSTYYADSVKGRFTISRDNSKNTLYLQMNSLRAEDTAVYYCARNRGNWGTYYFDYWGQGTLVTVSSGGGGSGGGGSGGGGSQSVL |
| inh. | TQPPSASGTPGQRVTISCSGSSSXIGSNYVSWYQQLPGTAPKLLIYGSSNRPSXVPDRFSGSXSGTSASLAISGLRSEDXADYYCQSYDSSLSDHVVFGGXTKLTVLGDYXDHDGDYKDHDXDXXCDXXXAA [SEQ ID |
| (3) | NO: 149] |
| C1 | EVQLLESGGGLVQPGGSLRLSCAASGFTFSNAWMSWVRQAPGKGLEWVSAISGSGGSTYYADSVKGRFTISRDNSKNTLYLQMNSLRAEDTAVYYCARNRGNWGTYYFDYWGQGTLVTVSSGGGGSGGGGSGGGGSQSVL |
| inh. | TQPPSASGTPGQRVTISCSGSSSXIGSNYVSWYQQLPGTAPKLLIYGSSNRPSXVPDRFSGXXSGTSASLAISGLRSEDEADYYCQSYDSSLSXHVVFGGXTKLTVL [SEQ ID NO: 150] |
| (4) | |
| C5 (3) | EVQLLESGGGLVQPGGSLRLSCAASGFTFSSYGMHWVRQAPGKGLEWVSYISSSGSTIYYADSVKGRFTISRDNSKNTLYLQMNSLRAEDTAVYYCLTLGGYWGQGTLVTVSSGGGGSGGGGSGGGGSQSVLTQPPSASG |
| | TPGQRVTISCSGSSSNIGSNTVNWYQQLPGTAPKLLIYSNNQRPSGVPDRFSGSKSGTSASLAISGLRSXDEADYYCQSYDSSLSGWVFGGXTKLTVLXDYKXHDGDYKDHDIDXKDDDXXAA [SEQ ID NO: 151] |
| C4 (2) | EVQLLESGGGLVQPGGSLRLSCAASGFTFSDYYMSWVRQAPGKGLEWVSGVSWNGSRTHYADSVKGRFTISRDNSKNTLYLQMNSLRAEDTAVYYCAGYGSGSRATGYNWFAPWGQGTLVTVSSGGGGSGGGGSGGGGSQ |
| | SVLTQPPSASGTPGQRVTISCTGSSSNIGAGYDVHWYQQLPGTAPKLLIYRNNQRPSGVPDRFSGSXSGTSXSLAISGLRSEDXADYYCQSYDSSLXGPYWVFXXXNQXDGPRXXXKTMTXXXXXXDIDYXXXXXQXRXA |
| | XXXHHH-SPXXP [SEQ ID NO: 152] |
| C4 (3) | EVQLLEGGGLVQPGGSLRLSCAASGFTFSSYAMSWVRQAPGKGLEWVSAISGSGGSTYYADSVKGRFTISRDNSKNTLYLQMNSLRAEDTAVYYCARGWSTSSFDYWGQGTLVTVSSGGGGSGGGGSGGGGSQSVLTQPP |
| | SASGTPGQRVTISCSGSSSXIGNHYVSWYQQLPGTATKLLIYXDDLLPSXVPDRFSGSKSGTSASLAIXGLRSEDEADYYCAAWDDRSGQVLFGGXTKLTVLGDYXDHDGDYXDHDIDXXDDDXKAXAHHHHHH- |
| | XXRWPIRPXVSXXTIHXXXFXXXXXXKT [SEQ ID NO: 153] |
| C4 (4) | EVQLLESGGGLVQPGGSLRLSCAASGFTFSSYSMNWVRQAPGKGLEWVSGISGSGGSTYYADSVKGRFTISRDNSKNTLYLQMNSLRAEDTAVYYCAKHSGYGFDIWGCLGTLVTVSSGGGGSGGGGSGGGGSQSVLTQP |
| | PSASGTPGQRVTISCSGGASXLGMHFVSWYQQLPGTAPKLLIYYDDLLPSGVPDRFSGXXSGTSASLAISGLRSEDEADYYCAAWDDSLNGWVFGGXTKLXVLGDYXDXXGDYKDHDIDXKDXXXXAXAHXHHHH- |
| | SPXWXXRPIVXXITXXXXVXLQRXDWXXPXVXXXXXXXXXXPX [SEQ ID NO: 154] |
| C3 (3) | EVQLLESGGGLVQPGGSLRLSCAASGFTFSSYAMNWVRQAPGKGLEWVANINQDGSTKEYVDSVKGRFTISRDNSKNTLYLQMNSLRAEDTAVYYCARDTGGNYLGGYYYYGMDVWGQGTLVTVSSGGGGSGGGGSGGGG |
| | SQSVLTQPPSASGTPGQRVTISCSGSSSNIGSNYVYWYQQLPGTAPKLLIYRNDQRPSXVPDRFSGSXSGTSASLAISGLRSXDXADYYCSSYAGNNNLVFGGXTKLTVLGDYXDHDGDYKDHDIDYXDXDXXAA [SEQ |
| | ID NO: 155] |
| C3 (4) | EVQLLESGGGLVQPGGSLRLSCAASGFTFSDHYMDWVRQAPGKGLEWVSGISGNGATIDYADSVKGRFTISRDNSKNTLYLQMNSLRAEDTAVYYCARPSITAAGSEDAFDLWGQGTLVTVSSGGGGSGGGGSGGGGSQS |
| | VLTQPPSASGTPGQRVTISCSGSSSNIGSNYVYWYQQLPGTAPKLLIYGNSNRPSGVPDRFSGSKSGTSASLAISGLRSXDGADYYCQSYDSSLSGWVFGGXTKLTVLGXYXDHDGDYKDXDIDYKDDXXKAA [SEQ |
| | ID NO: 156] |
| C3 (5) | EVQLLESGGGLVQPGGSLRLSCAASGFTFSNYWMSWVRQAPGKGLEWVSGISGSGGTTYYADFVKGRFTISRDNSKNTLYLQMNSLRAEDTAVYYCARKYYYGSSGAFDIWGQGTLVTVSSGGGGSGGGGSGGGGSQSVL |
| | TQPPSASGTPGQRVTISCTGSSSNIGAGYDVHWYQQLPGTAPKLLIYRNNQRPSXVPDRFSGSXSGTSASLAIXGLRSEDXADYYCAAWDDSLXGPVFXGXTKLTVL [SEQ ID NO: 157] |
| C3 (6) | EVQLLESGGGLVQPGGSLRLSCAASGFTFSSYAMNWVRQAPGKGLEWVANINQDGSTKFYVDSVKGRFTISRDNSKNTLYLQMNSLRAEDTAVYYCARDTGGNYLGGYYYYGMDVWGQGTLVTVSSGGGGSGGGGSGGGG |
| | SQSVLTQPPSASGTPGQRVTISCSGSSSNIGSNYVYWYQQLPGTAPKLLIYRNDQRPSGVPDRFSGSXSGTSASLAISGLRSEDXADYYCSSYAGNNNLVFGGXXKLTVLGXXXDHDGDYKDHDIDXXDXDXXAA [SEQ |
| | ID NO: 158] |
| MYOM2 | EVQLLEGGGLVQPGGSLRLSCAASGFTFSSYAMSWVRQAPGKGLEWVSGISGSGGSTYYADSVKGRFTISRDNSKNTLYLQMNSLRAEDTAVYYCARGVVAGSWGQGTLVTVSSGGGGSGGGGSGGGGSQSVLTQPPSAS |
| (1) | IGTPGQRVTSCSGSSSXIGNNAVNWYQQLPGTAPKLLIYDNNKRPSXVPDRFSGXXSGTSXSLAIXGLRSEDEADYYCA [SEQ ID NO: 159] |
| MYOM2 | EVQLLESGGGLVQPGGSLRLSCAASGFTFSNEWMAWVRQAPGKGLEWVSSISSSSSYNYADSVKGRFTISRIDLSKNTLYLQMNSLRAEDTAVYYCAGTYHDFWSATYWGQGTLVTVSSGGGGSGGGGSGGGGSQSVLTQ |
| (2) | PPSASGTPGQRVTISCSGSSSNIGSNTVNWYQQLPGTAPKLLIYGNSNRPSXVPDRFSGSXSGTSASLAISGLRSEDXADYYCAAWDDSLNGWVFGGXTKLTVLGD [SEQ ID NO: 160] |
| LUM | EVQLLEGGGLVQPGGSLRLSCAASGFTFSSNYMSWVRQAPGKGLEWVSAISASGTYTYYTDSVNGRFTISRDNSKNTLYLQMNSLRAEDTAVYYCARVNTVGLGTPFDNWGQGTLVTVSSGGGGSGGGGSGGGGSQSVLT |
| | QPPSASGTPGQRVTISCSGSSSNIGSNTVNWYQQLPGTAPKLLIYGNRNRPSGVPDRFSGSXSGTSASLAISGLRSEDEADYYCAAWDDSLSGWVFGGXTKLTVLXDYXDHDGDYKDHDIDXXXDDXXAA [SEQ ID |
| | NO: 161] |
| DUSP | EVQLLESGGGLVQPGGSLRLSCAASGFTISSYGFHWVRQAPGKGLEWVAVISYDGSNKYYADSVKGRFTISRDNSKNTLYLQMNSLRAEDTAVYYCARGEFGVYWGQGTLVTVSSGGGGSGGGGSGGGGSQSVLTQPPSA |
| 9 | SGTPGQRVTISCSGSSSNIGSNYVYWYQQLPGTAPKLLIYGNRNRPSGVPDRFSGSXSGTSASLAISGLRSEDEADYYCSSYAGSNNFEVVFGGXTKLTVLGDYXDHDGDYKDHDIDYKDDDXKAA [SEQ ID NO: |
| | 162] |
| CHX10 | EVQLLESGGGLVQPGGSLRLSCAASGFTFSSYGMHWVRQAPGKGLEWVAVISYDGSNKYYADSVKGRFTISRDNSKNTLYLQMNSLRAEDTAVYYCARNSDYYGMDVWGQGTLVTVSSGGGGSGGGGSGGGGSQSVLTQP |
| (1) | PSASGTPGQRVTISCSGSSSNIGYSDVYWYQQLPGTAPKLLIYENNKRPSXVPDRFSGSXSGTSASLAISGLRSEDEADYYCSTWDDSLNGHVIFGG [SEQ ID NO: 163] |
| CHX10 | EVQLLESGGGLVQPGGSLRLSCAASGFTFSSYAMSWVRQAPGKGLEWVAVISYDGSNKYYADSVKGRFTISRDNSKNTLYLQMNSLRAEDTAVYYCARNYGDSINWFDPWGQGTLVTVSSGGGGSGGGGSGGGGSQSVLT |
| (3) | QPPSASGTPGQRVTISCSGSSSXIRSNTVNWYQQLPGTAPKLLIYGNSNRPSXVPDRFSGXXGTSXSLAISGLRSEDXADYYCAXWDDSLN [SEQ ID NO: 164] |
| ATP- | EVQLLESGGGLVQPGGSLRLSCAASGFTFSSYAMHWVRQAPGKGLEWVAVISYDGSKTYHADSVEGRFTISRDNSKNTLYLQMNSLRAEDTAVYYCARHLRPYYFDYWGQGTLVTVSSGGGGSGGGGSGGGGSQSVLTQP |
| 58 (1) | PSASGTPGQRVTISCSGSSSXIGSNTVNWYQQLPGTAPKLLIYGNSNRPSXVPDRFSGXXSGTSASLAISGLRSEDXADYYCSAWDDRLRGRVFGG [SEQ ID NO: 165] |
| ATP- | EVQLLESGGGLVQPGGSLRLSCAASGFTFSSYGMHWVRQAPGKGLEWVSLISSASSYIYHADSVKGRFTISRDNSKNTLYLQMNSLRAEDTAVYYCARAGRVCTNGVCHTTFDYWGQGTLVTVSSGGGGSGGGGSGGGGS |
| 5B (2) | QSVLTQPPSASGTPGQRVTISCSGDRSNIGSNTVNWYQQLPGTAPKLLIYGNSNRPSGVPXRFSGSXSGTSXSLAISGLRSEDEADYYCQSYDSSLSAVVFGGXTKLTVLGDYXXHDXXYKDHDIDYXXDXDXAXAHXHH |
| | HH-SPRXXXXPIVSXXXXXXXXXXXXXXLXKXXXXPTXXXXXXXX [SEQ ID NO: 166] |
| ATP- | EVQLLESGGGLVQPGGSLRLSCAASGFTFSTYAMSWVRQAPGKGLEWVSSISSTSTYIHYADSVKGRFTISRDNSKNTLYLQMNSLRAEDTAVYYCARVSSWYSAFDIWGQGTLVTVSSGGGGSGGGGSGGGGSQSVLTQ |
| 5B (3) | PPSASGTPGQRVTISCTGSSSNIGNNAVNWYQQLPGTAPKLLIYSNNQRPSXVPDRFSGSXSGTSASLAISGLRSEDXADYYCQSYDSSLSGVIFGGXTKLXVLXDYXDHDGDYXDHDIDXXXDDKAA [SEQ ID NO: |
| | 167] |
| Sox11a | EVQLLESGGGLVQPGGSLRLSCAASGFTFSDFWMSWVRQAPGKGLEWVSSISGGGGTAFYVDSVKGRFTISRDNSKNTLYLQMNSLRAEDTALYYCARMTDLEGDAFDIWGQGTLVTVSSGGGGSGGGGSGGGGSQSVLT |
| | QPPSASGTPGQRVTISCSGSSSNIGSNYVNWYQQLPGTAPKLLIYNDNVRPSGVPDRFSGSXSGTSASLAISGLRSEDXADYYCQXWGTGVFGGXTKLTVLXDYXDHDGDXXDHDIDXKDXDXKAA [SEQ ID NO: |
| | 168] |
| TBC1 | EVQLLESGGGLVQPGGSLRLSCAASGFTFSSYSMSWVRQAPGKGLEWVAVISYDGSNKYYADSVKGRFTISRDNSKNTLYLQMNSLRAEDTAVYYCARDRTRGSTALDIWGQGTLVTVSSGGGGSGGGGSGGGGSQSVLT |
| D9 (1) | QPPSASGTPGQRVTISCSGSSSYIGSNYVYWYQQLPGTAPKLLIYRNNQRPXXVPDRFSGXXSGTSASLAISGLASEDEADYYCAAWDDSLSGWVFGGXTKLTVLGD [SEQ ID NO: 169] |
| UPF3 | EVQLLESGGGLVQPGGSLRLSCAASGFTFSDYYMTWIRQAPGKGLEWVSDISWNGSRTHYADSVKGRFTISRDNSKNTLYLQMNSLRAEDTAVYYCSSHLVYWGQGTLVTVSSGGGGSGGGGSGGGGSQSVLTQPPSASG |
| 8 (1) | TPGQRVTISCTGSSSNIGAGYDVHWYQQLPGTAPKLLIYDNNKRPSXVPDRFSGSXSGTSASLAIXGLRSEXXADYYCQTYDSSLSGSVVFGGXTKLTVLGDYXDHDXDY [SEQ ID NO: 170] |
| UPF3 | EVQLLESGGGLVQPGGSLRLSCAASGFTFSSYAMSWVRQAPGKGLEWVSYISSSSSYANYADSVKGRFTISRDNSKNTLYLQMNSLRAEDTAVYYCARLGVYSGTYLFAFDIWGQGTLVTVSSGGGGSGGGGSGGGGSQS |
| 8 (2) | VLTQPPSASGTPGQRVTISCTGSSSXIGAGYDVHWYQQLPGTAPKLLIYGNSNRPSXVPDRFSGSXSGTSASLAISGLRSXDEADYYCQSRDSSLSGWVFGGXTKLTVLGD [SEQ ID NO: 171] |
| Apo- | EVQLLESGGGLVQPGGSLRLSCAASGFTFSDYYMSWVRQAPGKGLEWVSGVSWNGSRTHYADSVKGRFTISRDNSKNTLYLQMNSLRAEDTAVYYCARVAYDIDAFDMWGQGTLVTVSSGGGG [SEQ ID NO: 172] |
| A4 (1) | |
| Apo- | EVQLLESGGGLVQPGGSLRISCAASGFTFSDYYMSWVRQAPGKGLEWVSGVSWNGSRTHYADSVKGRFTISRDNSKNTLYLQMNSLRAEDTAVYYCARVAYDIDAFDMWGQGTLVTVSSGGGGSGGGGSGGGGSQSVLTQ |
| A4 (2) | PPSASGTPGQRVTISCSGSFSNIGSNYVYWYQQLPGTAPKLLIYENNKRPSGVPDRFSGSKSGTSASLAISGLRSEDEADYYCAAWDDSLNGPMFGGXTKLTVLXDYDKDHDGDYKDHDIDYKDDXXXXAAHHHHHH- |
| | SPRWXIRPXXSXXTIHXXXXLXXXD [SEQ ID NO: 173] |
| Apo- | EVQLLESGGGLVQPGGSLRLSCAASGFTFSSYSMNWVRQAPGKGLEWVSAITGSGNATFYADSVKGRFTISRDNSKNTLYLQMNSLRAEDTAVYYCTTGATTRWGQGTLVTVSSGGGGSGGGGSGGGGSQSVLTQPPSAS |
| A4 (3) | GTPGQRVTISCSGSRSNIGSNHVFWYQQLPGTAPKLLIYENNKRPSGVPDRFSGSXSGTSASLAISGLRSEDXADYYCAAWDDSLSGWVFGG [SEQ ID NO: 174] |
| TBC1 | EVQLLESGGGLVQPGGSLRLSCAASGFTFSNAWMSWVRQAPGKGLEWVSFISSSSSYIYYADSVKGRFTISRDNSKNTLYLQMNSLRAEDTAVYYCARVNLVGCTNGVCNGHDYWGQGTLVTVSSGGGGSGGGGSGGGGS |
| D9 (2) | QSATQPPSASGTPGQRVTISCSGSSSXIGSNTVNWYQQLPGTAPKLLIYDNNKRP [SEQ ID NO: 175] |
| TBC1 | EVQLLESGGGLVQPGGSLRLSCAASGFTFGDYAMSWVRQAPGKGLEWVSAISGSGGSTYYADSVKGRFTISRDNSKNTLYLQMNSLRAEDTAVYYCAKGRTMASHWGQGTLVTVSSGGGGSGGGGSGGGGSQSVLTQPPS |
| D9 (3) | ASGTPGQRVTISCSGSSSXIGNNHVSWYQQLPGTAPKLLIYGNSNRPSXVPDRFSGSXSGTSASLAISGLRSEDXADYYCAAWDNSLKVWMFGG [SEQ ID NO: 176] |
| ORP-3 | EVQLLESGGGLVQPGGSLRLSCAASGFTFSSNYMSWVRQAPGKGLEWVSYISGNSGYTNYADSVKGRFTISRDNSKNTLYLQMNSLRAEDTAVYYCARHAGSYDMYGMDVWGQGTLVTVSSGGGGSGGGGSGGGGSQSVL |
| (1) | TQPPSASGTPGQRVTISCSGSTSXIGSHYVYWYQQLPGTAPKLLIYGNSNRPXXVPDRFSGXXSGTSXSLAISGLRSEDXADYYCQSYDSRLSGWVFGG [SEQ ID NO: 177] |
| ORP-3 | EVQLLESGGGLVQPGGSLRLSCAASGFTFSSYAMHWVRQAPGKGLEWVAVISYDGSNKYYADSVKGRFTISRDNSKNTLYLQMNSLRAEDTAVYYCARKSSLDVWGQGTLVTVSSGGGGSGGGGSGGGGSQSVLTQPPSA |
| (2) | SGTPGQRVTISCSGSSSXIGNNYVSWYQQLPGTAPKLLIYDDNKRPSGVPDRFSGSXSDTSASLAISGLRSEDEADYYCAAWDDSLXGRVFGGXTKLTVLG [SEQ ID NO: 178] |
| CIMS | EVXLLESGGGLVQPGGSLRLSCAASGFTFSDHYMDWVRQAPGKGLEWVSGISGSGGSTYYGDSVKGRFTISRDNSKNTLYLQMNSLRAEDTAVYYCASRLYWGQGTLVTVSSGGGGSGGGGSGGGGSQSVLTQPPSASGT |
| (5) | PGQRVTISCTGSSSNIGAGYVVHWYQQLPGTAPKLLIYDNDKRPSGVPDRFSGSKSGTSASLAISGLRSEDEADYYCAAWDDSLDAVLFGGXXKLTVLGEQKLISEXDLSGSAA [SEQ ID NO: 179] |
| CIMS | EVQLLESGGGLVQPGGSLRLSCAASGFTFSSYAMSWVRQAPGKGLEWVSAISGSGGRTYYTDSVRDRFTISRDNSKNTLYLQMNSLRAEDTAVYYCARDLMPVCQYCYGMDVWGQGTLVTVSSGGGGSGGGGSGGGGSQS |
| (13) | VLTQPPSASGTPGQRVTISCTGSSSNIGAGYDVHWYQQLPGTAPKLLIYSNNQRPSGVPDRFSGSXSGTSASLAISGLRSEDEADYXCQSYDSSLNKDVVFGGXTKLTVLGEQKLISXXDISGSAXAHHHHHH- |
| | SPRXPIRPIVSRXTIHWXXXLXXXDWENXXXTXLXXXAXXPPFXXXXX [SEQ ID NO: 180] |
| PKB | EVQLLESGGGLVQPGGSLRLSCAASGFTFGSSYMSWVRQAPGKGLEWVSSISSGGSYTYYADSVKGRFTISRDNSKNTLYLQMNSLRAEDTAVYYCARYHASWGRYLDYWGQGTLVTVSSGGGGSGGGGSGGGGSDIQMT |
| gamma | QSPSSLSASVGDRVTITCRASQSISSYLNWYQQKPGKAPKLLIYAASSLQSGVPSRFSGSGSGTDFTLTISSLQPEDFATYYCQQVSSWLSTFGQGTKLEIKRLGDYKDHDGDYKDHDIDYKDDDDKAAAHHHHHH* |
| (1) | [SEQ ID NO: 181] |
| PKB | EVQLLESGGGLVQPGGSLRLSCAASGFTFSYSGMGWVRQAPGKGLEWVSYISSGSYYTGYADSVKGRFTISRDNSKNTLYLQMNSLRAEDTAVYYCARYSGWRHGFDYWGQGTLVTVSSGGGGSGGGGSGGGGSDIQMTQ |
| gamma | SPSSLSASVGDRVTITCRASQSISSYLNWYQQKPGKAPKLLIYAASSLQSGVPSRFSGSGSGTDFTLTISSLQPEDFATYYCQQATVSPSTFGQGTKLEIKRLGDYKDHDGDYKDHDIDYKDDDDKAAAHHHHHH* |
| (2) | [SEQ ID NO: 182] |
| BTK | EVQLLESGGGLVQPGGSLRLSCAASGFTFGSYYMGWVRQAPGKGLEWVSSIGSGYYSTYYADSVKGRFTISRDNSKNTLYLQMNSLRAEDTAVYYCARGPYWWGIDYWGQGTLVTVSSGGGGSGGGGSGGGGSDIQMTQS |
| (2) | PSSLSASVGDRVTITCRASQSISSYLNWYQQKPGKAPKLLIYAASSLQSGVPSRFSGSGSGTDFTLTISSLQPEDFATYYCQQWFYHGPHTFGQGTKLEIKRLGDYKDHDGDYKDHDIDYKDDDDKAAAHHHHHH* |
| | [SEQ ID NO: 183] |
| BTK | EVQLLESGGGLVQPGGSLRLSCAASGFTFSSYAMSWVRQAPGKGLEWVSAISGSGGSTYYADSVKGRFTISRDNSKNTLYLQMNSLRAEDTAVYYCARGYYGMDYWGQGTLVTVSSGGGGSGGGGSGGGGSDIQMTQSPS |
| (3) | SLSASVGDRVTITCRASQSISSYLNWYQQKPGKAPKLLIYAASSLQSGVPSRFSGSGSGTDFTLTISSLQPEDFATYYCQQTWYLPTFGQGTKLEIKRLGDYKDHDGDYKDHDIDYKDDDDKAAAHHHHHH* [SEQ ID |
| | NO: 184] |
| BTK | EVQLLESGGGLVQPGGSLRISCAASGFTFSSYAMSWVRQAPGKGLEWVSAISGSGGSTYYADSVKGRFTISRDNSKNTLYLQMNSLRAEDTAVYYCARGYYGLDYWGQGTLVTVSSGGGGSGGGGSGGGGSDIQMTQSPS |
| (4) | SLSASVGDRVTITCRASQSISSYLNWYQQKPGKAPKLLIYAASSLQSGVPSRFSGSGSGTDFTLTISSLQPEDFATYYCQQSGAVPPTFGQGTKLEIKRLGDYKDHDGDYKDHDIDYKDDDDKAAAHHHHHH* [SEQ |
| | ID NO: 185] |
| CDK-2 | EVQLLESGGGLVQPGGSLRLSCAASGFTFSSYAMSWVRQAPGKGLEWVSGISSYYGYTYYADSVKGRFTISRDNSKNTLYLQMNSLRAEDTAVYYCARVYGYYMDYWGQGTLVTVSSGGGGSGGGGSGGGGSDIQMTQSP |
| (1) | SSLSASVGDRVTITCRASQSISSYLNWYQQKPGKAPKLLIYAASSLQSGVPSRFSGSGSGTDFTLTISSLQPEDFATYYCQQSSSLYTFGQGTKLEIKRLGDYKDHDGDYKDHDIDYKDDDDKAAAHHHHHH* [SEQ |
| | ID NO: 186] |
| CDK-2 | EVQLLESGGGLVQPGGSLRLSCAASGFTFGSSYMGWVRQAPGKGLEWVSSIYGSSSYTSYADSVKGRFTISRDNSKNTLYLQMNSLRAEDTAVYYCARWYWSWSSFDYWGQGTLVTVSSGGGGSGGGGSGGGGSDIQMTQ |
| (2) | SPSSLSASVGDRVTITCRASQSISSYLNWYQQKPGKAPKLLIYAASSLQSGVPSRFSGSGSGTDFTLTISSLQPEDFATYYCQQGGWPYTFGQGTKLEIKRLGDYKDHDGDYKDHDIDYKDDDDKAAAHHHHHH* [SEQ |
| | ID NO: 187] |
| GM- | EVQLLESGGGLVQPGGSLRLSCAASGFTFSSYGMSWVRQAPGKGLEWVSYIGSGYYYTSYADSVKGRFTISRDNSKNTLYLQMNSLRAEDTAVYYCARGGYFDYWGQGTLVTVSSGGGGSGGGGSGGGGSDIQMTQSPSS |
| CSF | LSASVGDRVTITCRASQSISSYLNWYQQKPGKAPKLLIYAASSLQSGVPSRFSGSGSGTDFTLTISSLQPEDFATYYCQQGYHLPTFGQGTKLEIKRIGDYKDHDGDYKDHDIDYKDDDDKAAAHHHHHH* [SEQ ID |
| (4) | NO: 188] |
| GM- | EVQLLESGGGLVQPGGSLRLSCAASGFTFGSGYMYWVRQAPGKGLEWVSSISSSYGYTYYADSVKGRFTISRDNSKNTLYLQMNSLRAEDTAVYYCARGVVYPSNYFDYWGQGTLVTVSSGGGGSGGGGSGGGGSDIQMT |
| CSF | QSPSSLSASVGDRVTITCRASQSISSYLNWYQQKPGKAPKLLIYAASSLQSGVPSRFSGSGSGTDFTLTISSLQPEDFATYYCQQGYPWWWGPYTFGQGTKLEIKRLGDYKDHDGDYKDHDIDYKDDDDKAAAHHHHHH* |
| (5) | [SEQ ID NO: 189] |
| GM- | EVQLLESGGGLVQPGGSLRLSCAASGFTFSSYAMSWVRQAPGKGLEWVSAISGSGGSTYYADSVKGRFTISRDNSKNTLYLQMNSLRAEDTAVYYCARYYSGSWGHYFDYWGQGTLVTVSSGGGGSGGGGSGGGGSDIQM |
| CSF | TQSPSSLSASVGDRVTITCRASQSISSYLNWYQQKPGKAPKLLIYAASSLQSGVPSRFSGSGSGTDFTLTISSLQPEDFATYYCQQVFSNPLTFGQGTKLEIKRLGDYKDHDGDYKDHDIDYKDDDDKAAAHHHHHH* |
| (6) | [SEQ ID NO: 190] |
| FASN | EVQLLESGGGLVQPGGSLRLSCAASGFTFGYSGMSWVRQAPGKGLEWVSYIGGGYGSTSYADSVKGRFTISRDNSKNTLYLQMNSLRAEDTAVYYCARWSWHHGSYTMDYWGQGTLVTVSSGGGGSGGGGSGGGGSDIQM |
| (1) | TQSPSSLSASVGDRVTITCRASQSISSYLNWYQQKPGKAPKLLIYAASSLQSGVPSRFSGSGSGTDFTLTISSLQPEDFATYYCQQGYSWFLPTFGQGTKLEIKRLGDYKDHDGDYKDHDIDYKDDDDKAAAHHHHHH* |
| | [SEQ ID NO: 191] |
| FASN | EVQLLESGGGLVQPGGSLRLSCAASGFTFSGSSMSWVRQAPGKGLEWVSSIYYGSGYTYYADSVKGRFTISRDNSKNTLYLQMNSLRAEDTAVYYCARGTYLDYWGQGTLVTVSSGGGGSGGGGSGGGGSDIQMTQSPSS |
| (2) | LSASVGDRVTITCRASQSISSYLNWYQQKPGKAPKLLIYAASSLQSGVPSRFSGSGSGTDFTLTISSLQPEDFATYYCQQHTWWSSYLHTFGQGTKLEIKRLGDYKDHDGDYKDHDIDYKDDDDKAAAHHHHHH* [SEQ |
| | ID NO: 192] |
| FASN | EVQLLESGGGLVQPGGSLRLSCAASGFTFYGYSMGWVRQAPGKGLEWVSSISYSGGYTYYADSVKGRFTISRDNSKNTLYLQMNSLRAEDTAVYYCARWSHVDSGALDYWGQGTLVTVSSGGGGSGGGGSGGGGSDIQMT |
| (3) | QSPSSLSASVGDRVTITCRASQSISSYLNWYQQKPGKAPKLLIYAASSLQSGVPSRFSGSGSGTDFTLTISSLQPEDFATYYCQQYWYTYWLPTFGQGTKLEIKRLGDYKDHDGDYKDHDIDYKDDDDKAAAHHHHHH* |
| | [SEQ ID NO: 193] |
| FASN | EVQLLESGGGLVQPGGSLRLSCAASGFTFSGSGMSWVRQAPGKGLEWVSYIGSYYGGTYYADSVKGRFTISRDNSKNTLYLQMNSLRAEDTAVYYCARAFVNGVGGWGPYFDYWGQGTLVTVSSGGGGSGGGGSGGGGSD |
| (4) | IQMTQSPSSLSASVGDRVTITCRASQSISSYLNWYQQKPGKAPKLLIYAASSLQSGVPSRFSGSGSGTDFTLTISSLQPEDFATYYCQQSFFPPYTFGQGTKLEIKRLGDYKOHDGDYKDHDIDYKDDDDKAAAHHHHHH* |
| | [SEQ ID NO: 194] |
| GAK | EVQLLESGGGLVQPGGSLRLSCAASGFTFGSSYMSWVRQAPGKGLEWVSSISSSSYGTYVADSVKGRFTISRDNSKNTLYLQMNSLRAEDTAVYYCARNPGFDYWGQGTLVTVSSGGGGSGGGGSGGGGSDIQMTQSPSS |
| (1) | LSASVGDRVTITCRASQSISSYLNWYQQKPGKAPKLLIYAASSLQSGVPSRFSGSGSGTDFTLTISSLQPEDFATYYCQQHYWLPTFGQGTKLEIKRLGDYKDHDGDYKDHDIDYKDDDDKAAAHHHHHH* [SEQ ID |
| | NO: 195] |
| GAK | EVQLLESGGGLVQPGGSLRLSCAASGFTFGGGGMSWVRQAPGKGLEWVSSISSSGYGTYYADSVKGRFTISRDNSKNTLYLQMNSLRAEDTAVYYCARWGWSYLDYWGQGTLVTVSSGGGGSGGGGSGGGGSDIQMTQSP |
| (2) | SSLSASVGDRVTITCRASQSISSYLNWYQQKPGKAPKLLIYAASSLQSGVPSRFSGSGSGTDFTLTISSLQPEDFATYYCQQSYYPLYTFGQGTKLEIKRLGDYKDHDGDYKDHDIDYKDDDDKAAAHHHHHH* [SEQ |
| | ID NO: 196] |
| GAK | EVQLLESGGGLVQPGGSLRLSCAASGFTFGSSYMSWVRQAPGKGLEWVSGISSSGYGTYYADSVKGRFTISRDNSKNTLYLQMNSLRAEDTAVYYCARGYYHYGYAGFYFDYWGQGTLVTVSSGGGGSGGGGSGGGGSDI |
| (3) | QMTQSPSSLSASVGDRVTITCRASQSISSYLNWYQQKPGKAPKLLIYAASSLQSGVPSRFSGSGSGTDFTLTISSLQPEDFATYYCQQSAYLFTFGQGTKLEIKRLGDYKDHDGDYKDHDIDYKDDDDKAAAHHHHHH* |
| | [SEQ ID NO: 197] |
| HADH | EVQLLESGGGLVQPGGSLRLSCAASGFTFSSYYMSWVRQAPGKGLEWVSSISSGGYGTGYADSVKGRFTISRDNSKNTLYLQMNSLRAEDTAVYYCARSYGWGPLDYWGQGTLVTVSSGGGGSGGGGSGGGGSDIQMTQS |
| 2 (1) | PSSLSASVGDRVTITCRASQSISSYLNWYQQKPGKAPKLLIYAASSLQSGVPSRFSGSGSGTDFTLTISSLQPEDFATYYCQQGYNWPYTFGQGTKLEIKRLGDYKDHDGDYKDHDIDYKDDDDKAAAHHHHHH* [SEQ |
| | ID NO: 198] |
| HADH | EVQLLESGGGLVQPGGSLRLSCAASGFTFSGSYMSWVRQAPGKGLEWVSSISGGSYYTSYADSVKGRFTISRDNSKNTLYLQMNSLRAEDTAVYYCARWSFNVVAHHWLDYWGQGTLVTVSSGGGGSGGGGSGGGGSDIQ |
| 2 (2) | MTQSPSSLSASVGDRVTITCRASQSISSYLNWYQQKPGKAPKLLIYAASSLQSGVPSRFSGSGSGTDFTLTISSLQPEDFATYYCQQSYYAPYTFGQGTKLEIKRLGDYKDHDGDYKDHDIDYKDDDDKAAAHHHHHH* |
| | [SEQ ID NO: 199] |
| HADH | EVQLLESGGGLVQPGGSLRLSCAASGFTFGSSYMSWVRQAPGKGLEWVSSISSYGYYTGYADSVKGRFTISRDNSKNTLYLQMNSLRAEDTAVYYCARSYGSWYFDYWGQGTLVTVSSGGGGSGGGGSGGGGSDIQMTQS |
| 2 (3) | PSSLSASVGDRVTITCRASQSISSYLNWYQQKPGKAPKLLIYAASSLQSGVPSRFSGSGSGTDFTLTISSLQPEDFATYYCQQGFVGPSTFGQGTKLEIKRIGDYKDHDGDYKDHDIDYKDDDDKAAAHHHHHH* [SEQ |
| | ID NO: 200] |
| HADH | EVQLLESGGGLVQPGGSLRLSCAASGFTFGGSYMSWVRQAPGKGLEWVSSISGGSWTSYADSVKGRFTISRDNSKNTLYLQMNSLRAEDTAVYYCARWSPPSYSYGFSYYRYFDYWGQGTLVTVSSGGGGSGGGGSGGGG |
| 2 (4) | SDIQMTQSPSSLSASVGDRVTITCRASQSISSYLNWYQQKPGKAPKLLIYAASSLQSGVPSRFSGSGSGTDFTLTISSLQPEDFATYYCQQSYPPSTFGQWKLEIKRLGDYKDHDGDYKDHDIDYKDDDDICAAAHHHHH |
| | H* [SEQ ID NO: 201] |
| IL-6 | EVQLLESGGGLVQPGGSLRLSCAASGFTFGYSYMSWVRQAPGKGLEWVSAISGSGGSTYYADSVKGRFTISRDNSKNTLYLQMNSLRAEDTAVYYCARYHASYPSYYWYIDYWGQGTLVTVSSGGGGSGGGGSGGGGSDI |
| (5) | QMTQSPSSLSASVGDRVTITCRASQSISSYLNWYQQKPGKAPKLLIYAASSLQSGVPSRFSGSGSGTDFTLTISSLQPEDFATYYCQQVWHGLHTFGQGTKLEIKRLGDYKDHDGDYKDHDIDYKDDDDKAAAHHHHHH* |
| | [SEQ ID NO: 202] |
| IL-6 | EVQLLESGGGLVQPGGSLRLSCAASGFTFGSSSMSWVRQAPGKGLEWVSSISYGSSSTSYADSVKGRFTISRDNSKNTLYLQMNSLRAEDTAVYYCARGGYGFDYWGQGTLVTVSSGGGGSGGGGSGGGGSDIQMTQSPS |
| (6) | SLSASVGDRVTITCRASQSISSYLNWYQQKPGKAPKLLIYAASSLQSGVPSRFSGSGSGTDFTLTISSLQPEDFATYYCQQGGYWPLTFGQGTKLEIKRLGDYKDHDGDYKDHDIDYKDDDDKAAAHHHHHH* [SEQ |
| | ID NO: 203] |
| IL-6 | EVQLLESGGGLVQPGGSLRLSCAASGFTFGYSSMGWVRQAPGKGLEWVSGISSYGYGTYYADSVKGRFTISRDNSKNTLYLQMNSLRAEDTAVYYCARYHSGWGMDYWGQGTLVTVSSGGGGSGGGGSGGGGSDIQMTQS |
| (7) | PSSLSASVGDRVTITCRASQSISSYLNWYQQKPGKAPKLLIYAASSLQSGVPSRFSGSGSGTDFTLTISSLQPEDFATYYCQQSFAYLHTFGQGTKLEIKRLGDYKDHDGDYKDHDIDYKDDDDKAAAHHHHHH* [SEQ |
| | ID NO: 204] |
| IL-6 | EVQLLESGGGLVQPGGSLRLSCAASGFTFSGYGMSWVRQAPGKGLEWVSSISSSSSYTYYADSVKGRFTISRDNSKNTLYLQMNSLRAEDTAVYYCARYGWGYFDYWGQGTLVTVSSGGGGSGGGGSGGGGSDIQMTQSP |
| (8) | SSLSASVGDRVTITCRASQSISSYLNWYQQKPGKAPKLLIYAASSLQSGVPSRFSGSGSGTDFTLTISSLQPEDFATYYCQQSSYYPPTFGQGTKLEIKRLGDYKDHDGDYKOHDIDYKDDDDKAAAHHHHHH* [SEQ |
| | ID NO: 205] |
| Keratin | EVQLLESGGGLVQPGGSLRLSCAASGFTFGYYYMYWVRQAPGKGLEWVSSIGSSGSSTSYADSVKGRFTISRDNSKNTLYLQMNSLRAEDTAVYYCARGHAFFDYWGQGTLVTVSSGGGGSGGGGSGGGGSDIQMTQSPS |
| 19 | SLSASVGDRVTITCRASQSISSYLNWYQQKPGKAPKLLIYAASSLQSGVPSRFSGSGSGTDFTLTISSLQPEDFATYYCQQVWYWPPTFGQGTKLEXKRLXDYKDHDGDYKXHDIDYKDDCDKAA [SEQ ID NO: |
| (1) | 206] |
| Keratin | EVQLLESGGGLVQPGGSLRLSCAASGFTFYGSSMSWVRQAPGKGLEWVSYIGSDSSYTSYADSVKGRFTISRDNSKNTLYLQMNSLRAEDTAVYYCARSYWSVFDYWGQGTLVTVSSGGGGSGGGGSGGGGSDIQMTQSP |
| 19 | SSLSASVGDRVTITCRASQSISSYLNWYQQKPGKAPKLLIYAASSLQSGVPSRFSGSGSGTDFTLTISSLQPEDFATYYCQQSYWSWLPTFGQGXKLEIKRLXDYKDHDGDYKDHDIDYKDDDDKAA [SEQ ID NO: |
| (2) | 207] |
| Keratin | EVQLLEGGGLVQPGGSLRLSCAASGFTFSSYAMSWVRQAPGKGLEWVSAISGSGGSTYYADSVKGRFTISRDNSKNTLYLQMNSLRAEDTAVYYCARWGGWWLDYWGQGTLVTVSSGGGGSGGGGSGGGGSDIQMTQSPS |
| 19 | SLSASVGDRVTITCRASQSISSYLNWYQQKPGKAPKLLIYAASSLQSGVPSRFSGSGSGTDFTLTISSLQPEDFATYYCQQWWSYYGALFTFGXGTKLXIKRLXDYKDHDGDYKDHDIDYKDDDDXXPPIIIIIIDHRGX |
| (3) | XXIXPIVSXXXRAHWXXFXXXXXXXX [SEQ ID NO: 208] |
| KSYK | EVQLLESGGGLVQPGGSLRLSCAASGFTFSSYAMSWVRQAPGKGLEWVSGISSGYYYTYYADSVKGRFTISRDNSKNTLYLQMNSLRAEDTAVYYCARVGWYWNGLDYWGQGTLVTVSSGGGGSGGGGSGGGGSDIQMTQ |
| (1) | SPSSLSASVGDRVTITCRASQSISSYLNWYQQKPGKAPKLLIYAASSLQSGVPSRFSGSGSGTDFTLTISSLQPEDFATYYCQQSSVLPTFGQGTKLEIKRLGDYKDHDGDYKDHDIDYKDDDDKAAAHHHHHH* [SEQ |
| | ID NO: 209] |
| KSYK | EVQLLESGGGLVQPGGSLRLSCAASGFTFSSYAMSWVRQAPGKGLEWVSAISGSGGSTYYADSVKGRFTISRDNSKNTLYLQMNSLRAEDTAVYYCARGYYGLDYWGQGTLVTVSSGGGGSGGGGSGGGGSDIQMTOSPS |
| (2) | SLSASVGDRVTITCRASQSISSYLNWYQQKPGKAPKLLIYAASSLQSGVPSRFSGSGSGTDFTLTISSLQPEDFATYYCQQSGAVPPTFGQGTKLEIKRLGDYKDHDGDYKDHDIDYKDDDDKAAAHHHHHH* [SEQ |
| | ID NO: 210] |
| MATK | EVQLLESGGGLVQPGGSLRLSCAASGFTFGSSYMGWVRQAPGKGLEWVSGIGGYGYVTGYADSVKGRFTISRDNSKNTLYLQMNSLRAEDTAVYYCARYDWGHSPGSWYYGSFDYWGQGTLVTVSSGGGGSGGGGSGGGG |
| (1) | SQSVLTQPPSASGTPGQRVTISCSGSSSNIGSSYVYWYQQLPGTAPKLLIYSNNQRPSGVPDRFSGSKSGTSASLAISGLRSEDEADYYCAAWAGAYHSHVVFGGGTKLTVLGDYKDHDGDYKDHDIDYKDDDDKAAAHH |
| | HHHH* [SEQ ID NO: 211] |
| MATK | EVQLLESGGGLVQPGGSLRLSCAASGFTFYGYSMYWVRQAPGKGLEWVSYIGSYSGSTSYADSVKGRFTISRDNSKNTLYLQMNSLRAEDTAVYYCARYYHYYHTWLDYWGQGTLVTVSSGGGGSGGGGSGGGGSDIQMT |
| (2) | QSPSSLSASVGDRVTITCRASQSISSYLNWYQQKPGKAPKLLIYAASSLQSGVPSRFSGSGSGTDFTLTISSLQPEDFATYYCQQGFYPFTFGQGTKLEIKRLGDYKDHDGDYKDHDIDYKDDDDKAAAHHHHHH* |
| | [SEQ ID NO: 212] |
| MATK | EVQLLESGGGLVQPGGSLRLSCAASGFTFSSYAMSWVRQAPGKGLEWVSALSGSGGSTYYADSVKGRFTISRDNSKNTLYLQMNSLRAEDTAVYYCARYPFYDYSVVGGRWPSYGIDYWGQGTLVTVSSGGGGSGGGGS |
| (3) | GGGGSDIQMTQSPSSLSASVGDRVTITCRASQSISSYLNWYQQKPGKAPKLLIYAASSLQSGVPSRFSGSGSGTDFTLTISSLQPEDFATYYCQQWNSGVWLHTFGQGTKLEIKRLGDYKDHDGDYKDHDIDYKDDDDK |
| | AAAHHHHHH* [SEQ ID NO: 213] |
| MAPK- | EVQLLESGGGLVQPGGSLRLSCAASGFTFSGSGMYWVRQAPGKGLEWVSYISGSGSYTDYADSVKGRFTISRDNSKNTLYLQMNSLRAEDTAVYYCARSGSFDYWGQGTLVTVSSGGGGSGGGGSGGGGSDIQMTQSPS |
| 1(1) | SLSASVGDRVTITCRASQSISSYLNWYQQKPGKAPKLLIYAASSLQSGVPSRFSGSGSGTDFTLTISSLQPEDFATYYCQQVSSSLYTFGQGTKLEIKRLGDYKDHDGDYKDHDIDYKDDDDKAAAHHHHHH* [SEQ |
| | ID NO: 214] |
| MAPK- | EVQLLESGGGLVQPGGSLRLSCAASGFTFSYGDMSWVRQAPGKGLEWVSGISSGGSSTYYADSVKGRFTISRDNSKNTLYLQMNSLRAEDTAVYYCARGYGYAWYFDYWGQGTLVTVSSGGGGSGGGGSGGGGSDIQMT |
| 1 (2) | QSPSSLSASVGDRVTITCRASQSISSYLNWYQQKPGKAPKLLIYAASSLQSGVPSRFSGSGSGTDFTLTISSLQPEDFATYYCQQWWHPYTFGQGTKLEIKRLGDYKDHDGDYKDHDIDYKDDDDKAAAHHHHHH* |
| | [SEQ ID NO: 215] |
| MAPK- | EVQLLESGGGLVQPGGSLRLSCAASGFTFSYSYMYWVRQAPGKGLEWVSSISSGGDYTYYADSVKGRFTISRDNSKNTLYLQMNSLRAEDTAVYYCARNFWFDYWGQGTLVTVSSGGGGSGGGGSGGGGSDIQMTQSPS |
| 1 (3) | SLSASVGDRVTITCRASQSISSYLNWYQQKPGKAPKLLIYAASSLQSGVPSRFSGSGSGTDFTLTISSLQPEDFATYYCQQASGLYTFGQGTKLEIKRLGDYKDHDGDYKDHDIDYKDDDDKAAAHHHHHH* [SEQ |
| | ID NO: 216] |
| MAPK- | EVQLLESGGGLVQPGGSLRLSCAASGFTFSYSSMSWVRQAPGKGLEWVSAISGSGGSTYYADSVKGRFTISRDNSKNTLYLQMNSLRAEDTAVYYCARHYPFYWFDYWGQGTLVITSSGGGGSGGGGSGGGGSDIQMTQS |
| 1 (4) | PSSLSASVGDRVTITCRASQSISSYLNWYQQKPGKAPKLLIYAASSLQSGVPSRFSGSGSGTDFTLTISSLQPEDFATYYCQQGGSWAYPLTFGQGTKLEIKRLGDYKDHDGDYKDHDIDYKDDDDKAAAHHHHHH* |
| | [SEQ ID NO: 217] |
| MAPK- | EVQLLESGGGLVQPGGSLRLSCAASGFTFGYGGMSWVRQAPGKGLEWVSSIYGSSSSTYYADSVKGRFTISRDNSKNTLYLQMNSLRAEDTAVYYCARHWRSVYFDYWGQGTLVTVSSGGGGSGGGGSGGGGSDIQMTQS |
| 8 (1) | PSSLSASVGDRVTITCRASQSISSYLNWYQQKPGKAPKLLIYAASSLQSGVPSRFSGSGSGTDFTLTISSLQPEDFATYYCQQGWGSPLTFGQGTKLEIKRLGDYKDHDGDYKDHDIDYKDDDDKAAAHHHHHH* [SEQ |
| | ID NO: 218] |
| MAPK- | EVQLLESGGGLVQPGGSLRLSCAASGFTFSGSYMSWVRQAPGKGLEWVSSIYGYSSYTYYADSVKGRFTISRDNSKNTLYLQMNSLRAEDTAVYYCARGSYLDYVVGQGTLVTVSSGGGGSGGGGSGGGGSDIQMTQSPS |
| 8 (2) | SLSASVGDRVTITCRASQSISSYLNWYQQKPGKAPKLLIYAASSLQSGVPSRFSGSGSGTDFTLTISSLQPEDFATYYCQQYWYPYTFGQGTKLEIKRLGDYKDHDGDYKDHDIDYKDDDDKAAAHHHHHH* [SEQ ID |
| | NO: 219] |
| MAPK- | EVQLLESGGGLVQPGGSLRLSCAASGFTFGYYSMSWVRQAPGKGLEWVSSISSSSSYTYYADSVKGRFTSRDNSKNTLYLQMNSLRAEDTAVYYCARHYSSFDYWGQGTLVTVSSGGGGSGGGGSGGGGSDIQMTQSPSS |
| 8(3) | LSASVGDRVTITCRASQSISSYLNWYQQKPGKAPKLLIYAASSLQSGVPSRFSGSGSGTDFRTISSLQPEDFATYYCQQSYWYPFTFGQGTKLEIKRLGDYKDHDGDYKDHDIDYKDDDDKAAAHHHHHH* [SEQ ID |
| | NO: 220] |
| Osteo | EVQLLESGGGLVQPGGSLRLSCAASGFTFSSYAMSWVRQAPGKGLEWVSAISGSGGSTYYADSVKGRFTISRDNSKNTLYLQMNSLRAEDTAVYYCARAYSWFDYWGQGTLVTVSSGGGGSGGGGSGGGGSDIQMTQSPS |
| pontin | SLSASVGDRVTITCRASQSISSYLNWYQQKPGKAPKLLIYAASSLQSGVPSRFSGSGSGTDFTLTISSLQPEDFATYYCQQVAGYYHYPFTFGQGTKLEIKRLGDYKDHDGDYKDHDIDYKDDDDKAAAHHHHHH* |
| (1) | [SEQ ID NO: 221] |
| Osteo | EVQLLESGGGLVQPGGSLRLSCAASGFTFSSYAMSWVRQAPGKGLEWVSAISGSGGSTYYADSVKGRFTISRDNSKNTLYLQMNSLRAEDTAVYYCARYHYNYYMDYWGQGTLVTVSSGGGGSGGGGSGGGGSDIQMTQS |
| pontin | PSSLSASVGDRVTITCRASQSISSYLNWYQQKPGKAPKLLIYAASSLQSGVPSRFSGSGSGTDFTLTISSLQPEDFATYYCQQYSYLLTFGQGTKLEIKRLGDYKDHDGDYKDHDIDYKDDDDKAAAHHHHHH* [SEQ |
| (2) | ID NO: 222] |
| Osteo | EVQLLESGGGLVQPGGSLRLSCAASGFTFSSYAMSWVRQAPGKGLEWVSAISGSGGSTYYADSVKGRFTISRDNSKNTLYLQMNSLRAEDTAVYYCARAYSWFDYWGQGTLVTVSSGGGGSGGGGSGGGGSDIQMTQSPS |
| pontin | SLSASVGDRVTITCRASQSISSYLNWYQQKPGKAPKLLIYAASSLQSGVPSRFSGSGSGTDFTLTISSLQPEDFATYYCQQVTSGGHWPFTFGQGTKLEIKRLGDYKDHDGDYKDHDIDYKDDDDKAAAHHHHHH* |
| (3) | [SEQ ID NO: 223] |
| P85A | EVQLLESGGGLVQPGGSLRLSCAASGFTFYSSSMSWVRQAPGKGLEWVSGISSSYSYTYYADSVKGRFTISRDNSKNTLYLQMNSLRAEDTAVYYCARYSSYGSFDYWGQGTLVTVSSGGGGSGGGGSGGGGSDIQMTQS |
| (1) | PSSLSASVGDRVTITCRASQSISSYLNWYQQKPGKAPKLLIYAASSLQSGVPSRFSGSGSGTDFTLTISSLQPEDFATYYCQQSSAFPSTFGQGTKLEIKRLGDYKDHDGDYKDHDIDYKDDDDKAAAHHHHHH* [SEQ |
| | ID NO: 224] |
| P85A | EVQLLESGGGLVQPGGSLRLSCAASGFTFSSYSMGWVRQAPGKGLEWVSYIGYSSGSTYYADSVKGRFTISRDNSKNTLYLQMNSLRAEDTAWYCARDRYSYFDYWGQGTLVTVSSGGGGSGGGGSGGGGSDIQMTQSPS |
| (2) | SLSASVGDRVTITCRASQSISSYLNWYQQKPGKAPKLLIYAASSLQSGVPSRFSGSGSGTDFTLTISSLQPEDFATYYCQQWSYGPLTFGQGTKLEIKRLGDYKDHDGDYKDHDIDYKDDDDKAAAHHHHHH* [SEQ |
| | ID NO: 225] |
| P82A | EVQLLESGGGLVQPGGSLRLSCAASGFTFSSYAMSWVRQAPGKGLEWVSGISSGYYYTSYADSVKGRFTISRDNSKNTLYLQMNSLRAEDTAVYYCARNGAGSYSWFDYWGQGTLVTVSSGGGGSGGGGSGGGGSDIQMT |
| (3) | QSPSSLSASVGDRVTITCRASQSISSYLNWYQQKPGKAPKLLIYAASSLQSGVPSRFSGSGSGTDFTLTISSLQPEDFATYYCQQSSVWPFTFGQGTKLEIKRLGDYKDHDGDYKDHDIDYKDDDDKAAAHHHHHH* |
| | [SEQ ID NO: 226] |
| PTK6 | EVQLLESGGGLVQPGGSLRLSCAASGFTFSSYAMSWVRQAPGKGLEWVSAISGSGGSTYYADSVKGRFTISRDNSKNTLYLQMNSLRAEDTAVYYCARGGHGWYWGQGTLVTVSSGGGGSGGGGSGGGGSDIQMTQSPSS |
| | LSASVGDRVTITCRASQSISSYLNWYQQKPGKAPKLLIYAASSLQSGVPSRFSGSGSGTDFTLTISSLQPEDFATYYCQQGSDVPFTFGQGTKLEIKRLGDYKDHDGDYKDHDIDYKDDDDKAAAHHHHHH* [SEQ ID |
| | NO: 227] |
| PTPN | EVQLLESGGGLVQPGGSLRLSCAASGFTFGYSSMSWVRQAPGKGLEWVSSISYSGSGTGYADSVKGRFTISRDNSKNTLYLQMANSLRAEDTAVYYCARGWYPHPGHWYIDYWGQGTLVTVSSGGGGSGGGGSGGGGSDI |
| 1 (1) | QMTQSPSSLSASVGDRVTITCRASQSISSYLNWYQQKPGKAPKLLIYAASSLQSGVPSRFSGSGSGMFTLTISSLQPEDFATYYCQQHFSLPTFGQGTKLEIKRLGDYKDHDGDYKDHDIDYKDDDDKAAAHHHHHH* |
| | [SEQ ID NO: 228] |
| PTPN | EVQLLESGGGLVQPGGSLRLSCAASGFTFYSYGMYWVRQAPGKGLEWVSAISGSGGSTYYADSVKGRFTISRDNSKNTLYLQMNSLRAEDTAVYYCARGGYYAHYAFDYWGQGTLVTVSSGGGGSGGGGSGGGGSDIQMT |
| 1 (2) | QSPSSLSASVGDRVTITCRASQSISSYLNWYQQKPGKAPKLLIYAASSLQSGVPSRFSGSGSGTDFTLTISSLQPEDFATYYCQQSSTPFTFGQGTKLEIKRLGDYKDHDGDYKDHDIDYKDDDDKAAAHHHHHH* |
| | [SEQ ID NO: 229] |
| PTPN | EVQLLESGGGLVQPGGSLRLSCAASGFTFSYYSMSWVRQAPGKGLEWVSSISSSGGGTSYADSVKGRFTISRDNSKNTLYLQMNSLRAEDTAVYYCARWFSSAFDYWGQGTLVTVSSGGGGSGGGGSGGGGSDIQMTQSP |
| 1 (3) | SSLSASVGDRVTITCRASQSISSYLNWYQQKPGKAPKLLIYAASSLQSGVPSRFSGSGSGTDFTLTISSLQPEDFATYYCQQGVPPYTFGQGTKLEIKRLGDYKDHDGDYKDHDIDYKDDDDKAAAHHHHHH* [SEQ |
| | ID NO: 230] |
| RPS6K | EVQLLESGGGLVQPGGSLRLSCAASGFTFSSYAMSWVRQAPGKGLEWVSAISGSGGSTYYADSVKGRFTISRDNSKNTLYLQMNSLRAEDTAVYYCARRYSGYFDYWGQGTLVTVSSGGGGSGGGGSGGGGSDIQMTQSP |
| A2 (1) | SSLSASVGDRVTITCRASQSISSYLNWYQQKPGKAPKLLIYAASSLQSGVPSRFSGSGSGTDFTLTISSLQPEDFATYYCQQNWWGLPTEGQGTKLEIKRLGDYKDHDGDYKDHDIDYKDDDDKAAAHHHHHH* [SEQ |
| | ID NO: 231] |
| RPS6K | EVQLLESGGGLVQPGGSLRLSCAASGFTFYGSYMYWVRQAPGKGLEWVSGISPYSSSTYYADSVKGRFTISRDNSKNTLYLQMNSLRAEDTAVYYCARGFPFIDYWGQGTLVTVSSGGGGSGGGGSGGGGSDIQMTQSPS |
| A2 (2) | SLSASVGDRVTITCRASQSISSYLNWYQQKPGKAPKLLIYAASSLQSGVPSRFSGSGSGTDFTLTISSLQPEDFATYYCQQNGVGLLTFGQGTKLEIKRLGDYKDHDGDYKDHDIDYKDDDDKAAAHHHHHH* [SEQ |
| | ID NO: 232] |
| RPS6K | EVQLLESGGGLVQPGGSLRLSCAASGFTFYGYGMSWVRQAPGKGLEWVSGISGGSGSTGYADSVKGRFTISRDNSKNTLYLQMNSLRAEDTAVYYCARGYGTYARSSNFPSMDYWGQGTLVTVSSGGGGSGGGGSGGGGS |
| A2 (3) | DIQMTQSPSSLSASVGDRVTITCRASQSISSYLNWYQQKPGKAPKILIYAASSLQSGVPSRFSGSGSGTDFTLTISSLQPEDFATYYCQQHYWWGLFTFGQGTKLEIKRLGDYKDHDGDYKDHDIDYKDDDDKAAAHHHH |
| | HH* [SEQ ID NO: 233] |
| STAP2 | EVQLLESGGGLVQPGGSLRLSCAASGFTFSGYSMGWVRQAPGKGLEWVSGISSYYYGTSYADSVKGRFTLSRDNSKNTLYLQMNSLRAEDTAVYYCARSWTVGSSWDGDAFDYWGQGTLVTVSSGGGGSGGGGSGGGGSD |
| (1) | IQMTQSPSSLSASVGDRVTITCRASQSISSYLNWYQQKPGKAPKLLIYAASSLQSGVPSRFSGSGSGTDFTLTISSLQPEDFATYYCQQSYWYPLTFGQGTKLEIKRLGDYKOHDGDYKDHDIDYKDDDDKAAAHHHHHH* |
| | [SEQ ID NO: 234] |
| STAP2 | EVQLLESGGGLVQPGGSLRLSCAASGFTFYGGSMYWVRQAPGKGLEWVSSISSGGSYTYYADSVKGRFTISRDNSKNTLYLQMNSLRAEDTAVYYCARVGVDTMDYWGQGTLVTVSSGGGGSGGGGSGGGGSDIQMTQSP |
| (2) | SSLSASVGDRVTITCRASQSISSYLNWYQQKPGKAPKLLIYAASSLQSGVPSRFSGSGSGTDFTLTISSLQPEDFATYYCQQRWYWWYLFTFGQGTKLEIKRLGDYKDHDGDYKDHDIDYKDDDDKAAAHHHHHH* |
| | [SEQ ID NO: 235] |
| STAP2 | EVQLLESGGGLVQPGGSLRLSCAASGFTFGYYGMGWVRQAPGKGLEWVSSIYSGYGSTSYADSVKGRFTISRDNSKNTLYLQMNSLRAEDTAVYYCARAAWSGYMDYWGQGTLVTVSSGGGGSGGGGSGGGGSDIQMTQS |
| (3) | PSSLSASVGDRVTITCRASQSISSYLNWYQQKPGKAPKLLIYAASSLQSGVPSRFSGSGSGTDFTLTISSLQPEDFATYYCQQYSHYLLTFGQGTKLEIKRLGDYKDHDGDYKDHDIDYKDDDDKAAAHHHHHH* [SEQ |
| | ID NO: 236] |
| STAP2 | EVQLLESGGGLVQPGGSLRLSCAASGFTFYYGGMSWVRQAPGKGLEWVSSIYYSSGSTSYADSVKGRFTISRDNSKNTLYLQMNSLRAEDTAVYYCARHGWDDNGFDYWGQGTLVTVSSGGGGSGGGGSGGGGSDIQMTQ |
| (4) | SPSSLSASVGDRVTITCRASQSISSYLNWYQQKPGKAPKLLIYAASSLQSGVPSRFSGSGSGTDFTLTISSLQPEDFATYYCQQVYSYLFTFGQGTKLEIKRLGDYKDHDGDYKDHDIDYKDDDDKAAAHHHHHH* |
| | [SEQ ID NO: 237] |
| STAT1 | EVQLLESGGGLVQPGGSLRLSCAASGFTFGYYGMSWVRQAPGKGLEWVSGIYGSYYSTYYADSVKGRFTISRDNSKNTLYLQMNSLRAEDTAVYYCARHSWDYYFDYWGQGTLVTVSSGGGGSGGGGSGGGGSDIQMTQS |
| (1) | PSSLSASVGDRVTITCRASQSISSYLNWYQQKPGKAPKLLIYAASSLQSGVPSRFSGSGSGTDFTLTISSLQPEDFATYYCQQYHYGYGSPYTFGQGTKLEIKRLGDYKDHDGDYKDHDIDYKDDDDKAAAHHHHHH* |
| | [SEQ ID NO: 238] |
| STAT1 | EVQLLESGGGLVQPGGSLRLSCAASGFTFSYSSMYWVRQAPGKGLEWVSSISSYGHSTYYADSVKGRFTISRDNSKNTLYLQMNSLRAEDTAVYYCARSWGYYHYLDYWGQGTLVTVSSGGGGSGGGGSGGGGSDIQMTQ |
| (2) | SPSSLSASVGDRVTITCRASQSISSYLNWYQQKPGKAPKLLIYAASSLQSGVPSRFSGSGSGTDFLTISSLQPEDFATYYCQQTWHPYPSTFGQGTKLEIKRLGDYKDHDGDYKDHDIDYKDDDDKAAAHHHHHH* |
| | [SEQ ID NO: 239] |
| TENS4 | EVQLLESGGGLVQPGGSLRLSCAASGFTFSGYSMSWVRQAPGKGLEWVSSISSGYYSTYYADSVKGRFTISRDNSKNTLYLQMNSLRAEDTAVYYCARVYWGSPWFNPAMDYWGQGTLVTVSSGGGGSGGGGSGGGGSDI |
| | QMTQSPSSLSASVGDRVTITCRASQSISSYLNWYQQKPGKAPKLLIYAASSLQSGVPSRFSGSGSGTDFTLTISSLQPEDFATYYCQQWYYWVPPTFGQGTKLEIKRLGDYKDHDGDYKDHDIDYKDDDDKAAAHHHHHH* |
| | [SEQ ID NO: 240] |
| TNFRS | EVQLLESGGGLVQPGGSLRLSCAASGFTFYSSGMYWVRQAPGKGLEWVSAISGSGGSTYYADSVKGRFTISRDNSKNTLYLQMNSLRAEDTAVYYCARHGYSYSFDYWGQGTLVTVSSGGGGSGGGGSGGGGSDIQMTQS |
| F14 | PSSLSASVGDRVTITCRASQSISSYLNWYQQKPGKAPKLLIYAASSLQSGVPSRFSGSGSGTDFTLTISSLQPEDFATYYCQQGVFYPHTFXQGTKLEIKRLXDYKDHDGDYKDHDIDYKDDDXKAA [SEQ ID NO: |
| (1) | 241] |
| TNFRS | EVQLLESGGGLVQPGGSLRLSCAASGFTFSSYAMSWVRQAPGKGLEWVSAISGSGGSTYYADSVKGRFTISRDNSKNTLYLQMNSLRAEDTAVYYCARYVSHYTAHWYAYFDYWGQGTLVTVSSGGGGSGGGGSGGGGSD |
| F14 | IQMTQSPSSLSASVGDRVTITCRASQSISSYLNWYQQKPGKAPKLLIYAASSLQSGVPSRFSGSGSGTDFTLTISSLQPEDFATYYCQQAGYHPLTFGQGTKLEIKRLXDYKDHDXDYKDHDIDYXXXXDXAAXHHHHH |
| (2) | H-SPRWXXXFAL-VXLRALXXXXFXXXXXX [SEQ ID NO: 242] |
| TNFRS | EVQLLESGGGLVQPGGSLRLSCAASGFTFGSYSMSWVRQAPGKGLEWVSSISSYYGGTSYADSVKGRFTISRDNSKNTLYLQMNSLRAEDTAVYYCARGAYLDYWGQGTLVTVSSGGGGSGGGGSGGGGSDIQMTQSPSS |
| F3 (1) | LSASVGDRVTITCRASQSISSYLNWYQQKPGKAPKLLIYAASSLQSGVPSRFSGSGSGTDFTLTISSLQPEDFATYYCQQYYFPFTFGQGTKLEIKRLXXYKDHDGDYKDHDIDYKDDDDKAA [SEQ ID NO: 243] |
| TNFRS | EVQLLESGGGLVQPGGSLRLSCAASGFTFGSSYMYWVRQAPGKGLEWVSSIYGSSSSTSYADSVKGRFTISRDNSKNTLYLQMNSLRAEDTAVYYCARGYYWDYMDYWGQGTLVTVSSGGGGSGGGGSGGGGSDIQMTQS |
| F3 (2) | PSSLSASVGDRVTITCRASQSISSYLNWYQQKPGKAPKLLIYAASSLQSGVPSRFSGSGSGTDFTLTISSLQPEDFATYYCQQAWDLPTFGQGTKLEIKRXXYKDHDGDYKDHDIDXXXTMTRRP [SEQ ID NO: |
| | 244] |
| TNFRS | EVQLLESGGGLVQPGGSLRLSCAASGFTFSSYAMSWVRQAPGKGLEWVSAISGSGGSTYYADSVKGRFTISRDNSKNTLYLQMNSLRAEDTAVYYCARYYWGWYFDYWGQGTLVTVSSGGGGSGGGGSGGGGSDIQMTQS |
| F3 (3) | PSSLSASVGDRVTITCRASQSISSYLNWYQQKPGKAPKLLIYAASSLQSGVPSRFSGSGSGTDFTLTISSLQPEDFATYYCQQGWWYPLTFGQGTKLEIKRLXDYKDHDGDYKDHDIXYKDDDDXAA [SEQ ID NO: |
| | 245] |
| UBC9 | EVQLLESGGGLVQPGGSLRLSCAASGFTFGYGSMSWVRQAPGKGLEWVSSISYYGSSTGYADSVKGRFTISRDNSKNTLYLQMNSLRAEDTAVYYCARGVVWLDYWGCLGTLVTVSSGGGGSGGGGSGGGGSDIQMTQSP |
| (1) | SSLSASVGDRVTITCRASQSISSYLNWYQQKPGKAPKLLIYAASSLQSGVPSRFSGSGSGTDFTLTISSLQPEDFATYYCQQGPYPPTFGQGTKLEIKRLGDYKDHDGDYKDHDIDYKDDDDKAAAHHHHHH* [SEQ |
| | ID NO: 246] |
| UBC9 | EVQLLESGGGLVQPGGSLRLSCAASGFTFYGSSMSWVRQAPGKGLEWVSGISYSSSYTSYADSVKGRFTISRDNSKNTLYLQMNSLRAEDTAVYYCARATSYWFTYFGVIDYWGQGTLVTVSSGGGGSGGGGSGGGGSDI |
| (2) | QMTQSPSSLSASVGDRVTITCRASQSISSYLNWYQQKPGKAPKLLIYAASSLQSGVPSRFSGSGSGTDFTLTISSLQPEDFATYYCQQSWSPHTFGQGTKLEIKRLGDYKDHDGDYKDHDIDYKDDDDKAAAHHHHHH* |
| | [SEQ ID NO: 247] |
| UBC9 | EVQLLESGGGLVQPGGSLRLSCAASGFTFSSYAMSWVRQAPGKGLEWVSSIYGSSSYTYYADSVKGRFTISRDNSKNTLYLQMNSLRAEDTAVYYCARSASWGGYFDYWGQGTLVTVSSGGGGSGGGGSGGGGSDIQMTQ |
| (3) | SPSSLSASVGDRVTITCRASQSISSYLNWYQQKPGKAPKLLIYAASSLQSGVPSRFSGSGSGTDFTLTISSLQPEDFATYYCQQSGVSPYTFGQGTKLEIKRLGDYKDHDGDYKDHDIDYKDDDDKAAAHHHHHH* |
| | [SEQ ID NO: 248] |
| UBE2 | EVQLLESGGGLVQPGGSLRLSCAASGFTFGYYSMSWVRQAPGKGLEWVSAISGSGGSTYYADSVKGRFTISRDNSKNTLYLQMNSLRAEDTAVYYCARGGFWYGGYMDYWGQGTLVTVSSGGGGSGGGGSGGGGSDIQMT |
| C (1) | QSPSSLSASVGDRVTITCRASQSISSYLNWYQQKPGKAPKLLIYAASSLQSGVPSRFSGSGSGTDFTLTISSLQPEDFATYYCQQSSGPHPFTFGQGTKLEIKRLGDYKDHNDYKDHDIDYKDDDDKAAAHHHHHH* |
| | [SEQ ID NO: 249] |
| UBE2 | EVQLLESGGGLVQPGGSLRLSCAASGFTFSSYSMSWVRQAPGKGLEWVSSISGYSYGTYYADSVKGRFTISRDNSKNTLYLQMNSLRAEDTAVYYCARWHHPYYFDYWGQGTLVTVSSGGGGSGGGGSGGGGSDIQMTQS |
| C (2) | PSSLSASVGDRVTITCRASQSISSYLNWYQQKPGKAPKLLIYAASSLQSGVPSRFSGSGSGTDFTLTISSLQPEDFATYYCQQGSVLSTFGQGTKLEIKRLGDYKDHDGDYKDHDIDYKDDDDKAAAHHHHHH* [SEQ |
| | ID NO: 250] |
| UCHL | EVQLLESGGGLVQPGGSLRLSCAASGFTFSSYAMSWVRQAPGKGLEWVSAISGSGGSTYYADSVKGRFTISRDNSKNTLYLQMNSLRAEDTAVYYCARGWSLDYWGQGTLVTVSSGGGGSGGGGSGGGGSDIQMTQSPSS |
| 5 | LSASVGDRVTITCRASQSISSYLNWYQQKPGKAPKLLIYAASSLQSGVPSRFSGSGSGTDFTLTISSLQPEDFATYYCQQVHFLPTFGQGTKLEIKRLGDYKDHDGDYKDHDIDYKDDDDKAAAHHHHHH* [SEQ ID |
| | NO: 251] |
| Her2/ | EVQLVESGGGLVQPGGSLRLSCAASGFNIKDTYIHWVRQAPGKGLEWVARIYPTNGYTRYADSVKGRFTISADTSKNTAYLQMNSLRAEDTAVYYCSRWGGDGFYAMDYWGQGTLVTVSSGGGGSGGGGSGGGGSDIQMT |
| ErbB2 | QSPSSLSASVGDRVTITCRASQDVNTAVAWYQQKPGKAPKLLIYSASFLYSGVPSRFSGSRSGTDFTLTISSLQPEDFATYYCQQHYTTPPTFGQGTKVEIKRLGDYKDHDGDYKDHDIDYKDDDDKAAAHHHHHH* |
| 2 (4) | [SEQ ID NO: 252] |
| EGFR | QVQLKQSGPGLVQPSQSLSITCTVSGFSLTNYGVHWVRQSPGKGLEWLGVIWSGGNTDYNTPFTSRLSINKDNSKSQVFFKMNSLQSNDTAIYYCARALTYYDYEFAYWGQGTLVTVSSGGGGSGGGGSGGGGSDILLTQ |
| | SPVILSVSPGERVSFSCRASQSIGTNIHWYQQRTNGSPRLLIKYASESISGIPSRFSGSGSGTDFTLSINSVESEDIADYYCQQNNNWPTTFGAGTKLELKLGDYKDHDGDYKDHDIDYKDDDDKAAAHHHHHH* [SEQ |
| | ID NO: 253] |
| CHP-1 | EVQLLESGGGLVQPGGSLRLSCAASGFTFYYYGMSWVRQAPGKGLEWVSGIGYGYGTYADSVKGRFTISRDNSKNTLYLQMNSLRAEDTAVYYCARDSYSSPYYSLDYWGQGTLVTVSSGGGGSGGGGSGGGGSDIQMTQ |
| (1) | SPSSLSASVGDRVTITCRASQSISSYLNWYQQKPGKAPKLLIYAASSLQSGVPSRFSGSGSGTDFTLTISSLQPEDFATYYCQQSYSTPYTFGQGTKLEIKRLGDYKDHDGDYKDHDIDYKDDDDKAAAHHHHHH* |
| | [SEQ ID NO: 254] |
| CHP-1 | EVQLLESGGGLVQPGGSLRLSCAASGFTFYSYSMGWVRQAPGKGLEWVSSIGGSGYYTYVADSVKGRFTISRDNSKNTLYLQMNSLRAEDTAVYYCARNYNYYYGSYIDYWGQGTLVTVSSGGGGSGGGGSGGGGSDIQM |
| (2) | TQSPSSLSASVGDRVTITCRASQSISSYLNWYQQKPGKAPKLLIYAASSLQSGVPSRFSGSGSGTDFTLTISSLQPEDFATYYCQQSFYPHTFGQGTKLEIKRLGDYKDHDGDYKDHDIDYKDDDDKAAAHHHHHH* |
| | [SEQ ID NO: 255] |
| AGAP- | EVQLLESGGGLVQPGGSLRLSCAASGFTFGSYSMHWVRQAPGKGLEWVSSISSYSYSTYYADSVKGRFTISRDNSKNTLYLQMNSLRAEDTAVYYCARGGAYYTNPFDYWGQGTLTVSSGGGGSGGGGSGGGGSDIQMTQ |
| 2 (1) | SPSSLSASVGDRVTITCRASQSISSYLNWYQQKPGKAPKLLIYAASSLQSGVPSRFSGSGSGTDFTLTISSLQPEDFATYYCQQPGFYSLPTFGQGTKLEIKRLGDYKDHDGDYKDHDIDYKDDDDKAAAHHHHHH* |
| | [SEQ ID NO: 256] |
| AGAP- | EVQLLEGGGLVQPGGSLRLSCAASGFTFSSYYMYWVRQAPGKGLEWVSGISGYSYSTGYADSVKGRFTISRDNSKNTLYLQMNSLRAEDTAVYYCARYGYGSSFDYWGQGTLVTVSSGGGGSGGGGSGGGGSDIQMTQSP |
| 2 (2) | SSLSASVGDRVTITCRASQSISSYLNWYQQKPGKAPKLLIYAASSLQSGVPSRFSGSGSGTDFTLTISSLQPEDFATYYCQQGSYDPHTFGQGTKLEIKRLGDYKDHDGDYKDHDIDYKDDDDKAAAHHHHHH* [SEQ |
| | ID NO: 257] |
| AGAP- | EVQLLESGGGLVQPGGSLRLSCAASGFTFGGYSMYWVRQAPGKGLEWVSYISSGSSSTYYADSVKGRFTISRDNSKNTLYLQMNSLRAEDTAVYYCARGGGWYDYDFFDYWGQGTLVTVSSGGGGSGGGGSGGGGSDIQM |
| 2 (3) | TQSPSSLSASVGDRVTITCRASQSISSYLNWYQQKPGKAPKLLIYAASSLQSGVPSRFSGSGSGTDFTLTISSLQPEDFAIYYCQQSYSTPYTFGQGTKLEIKRLGDYKDHDGDYKDHDIDYKDDDDKAAAHHHHHH* |
| | [SEQ ID NO: 258] |
| AGAP- | EVQLLEGGGLVQPGGSLRLSCAASGFTFSSYAMSWVRQAPGKGLEWVSALSGSGGSTYYADSVKGRFTISRDNSKNTLYLQMNSLRAEDTAVYYCARSSDYFYYSYLDYWGQGTLVTVSSGGGGSGGGGSGGGGSDIQMT |
| 2 (4) | QSPSSLSASVGDRVTITCRASQSISSYLNWYQQKPGKAPKLLIYAASSLQSGVPSRFSGSGSGTDFTLTISSLQPEDFATYYCQQGWYYPFTFGQGTKLEIKRLGDYKDHDGDYKDHDIDYKDDDDKAAAHHHHHH* |
| | [SEQ ID NO: 259] |
| MAPK- | EVQLLESGGGLVQPGGSLRLSCAASGFTFYYSSMSWVRQAPGKGLEWVSSIYGGGGSTSYADSVKGRFTISRDNSKNTLYLQMNSLRAEDTAVYYCARGPGHVIDYWGQGTLVTVSSGGGGSGGGGSGGGGSDIQMTQSP |
| 9 (1) | SSLSASVGDRVTITCRASQSISSYLNWYQQKPGKAPKLLIYAASSLQSGVPSRFSGSGSGTDFTLTISSLQPEDFATYYCQQSYYVPFTFGQGTKLEIKRLGDYKDHDGDYKDHDIDYKDDDDKAAAHHHHHH* [SEQ |
| | ID NO: 260] |
| MAPK- | EVQLLESGGGLVQPGGSLRLSCAASGFTFSSYAMSWVRQAPGKGLEWVSAISGSGGSTYYADSVKGRFTISRDNSKNTLYLQMNSLRAEDTAVYYCARSHTVYFDYWGQGTLVTVSSGGGGSGGGGSGGGGSDIQMTQSP |
| 9 (2) | SSLSASVGDRVTITCRASQSISSYLNWYQQKPGKAPKLLIYAASSLQSGVPSRFSGSGSGTDFTLTISSLQPEDFATYYCQQSYSTPYTFGQGTKLEIKRLGDYKDHDGDYKDHDIDYKDDDDKAAAHHHHHH* [SEQ |
| | ID NO: 261] |
| MAPK- | EVQLLESGGGLVQPGGSLRLSCAASGFTFGSSGMSWVRQAPGKGLEWVSGIYGSSYGTGYADSVKGRFTISRDNSKNTLYLQMNSLRAEDTAVYYCARGFGYHIDYWGQGTLVTVSSGGGGSGGGGSGGGGSDIQMTQSP |
| 9 (3) | SSLSASVGDRVTITCRASQSISSYLNWYQQKPGKAPKLLIYAASSLQSGVPSRFSGSGSGTDFTLTISSLQPEDFATYYCQQYGSSLPTFGQGTKLEIKRLGDYKDHDGDYKDHDIDYKDDDDKAAAHHHHHH* [SEQ |
| | ID NO: 262] |
| MAPK- | EVQLLESGGGLVQPGGSLRLSCAASGFTFSGGSMSWVRQAPGKGLEWVSSISSSGSSTYYADSVKGRFTISRDNSKNTLYLQMNSLRAEDTAVYYCARAYYPNFDYWGQGTLVTVSSGGGGSGGGGSGGGGSDIQMTQSP |
| 9 (4) | SSLSASVGDRVTITCRASQSISSYLNWYQQKPGKAPKLLIYAASSLQSGVPSRFSGSGSGTDFTLTISSLQPEDFATYYCQQSYSTPYTFGQGTKLEIKRLGDYKDHDGDYKDHDIDYKDDDDKAAAHHHHHH* [SEQ |
| | ID NO: 263] |
| MAPK- | EVQLLESGGGLVQPGGSLRLSCAASGFTFSSYAMSWVRQAPGKGLEWVSGISSYGGSTSYADSVKGRFTISRDNSKNTLYLQMNSLRAEDTAVYYCARFGHAFPAFDYWGQGTLVTVSSGGGGSGGGGSGGGGSDIQMTQ |
| 9 (5) | SPSSLSASVGDRVTITCRASQSISSYLNWYQQKPGKAPKLLIYAASSLQSGVPSRFSGSGSGTDFTLTISSLQPEDFATYYCQQSYSTPYTFGQGTKLEIKRLGDYKDHDGDYKDHDIDYKDDDDKAAAHHHHHH* |
| | [SEQ ID NO: 264] |
| MAPK- | EVQLLESGGGLVQPGGSLRLSCAASGFTFSYGSMSWVRQAPGKGLEWVSAISGSGGSTYYADSVKGRFTISRDNSKNTLYLQMNSLRAEDTAVYYCARGHGSNIDYWGQGTLVTVSSGGGGSGGGGSGGGGSDIQMTQSP |
| 9 (6) | SSLSASVGDRVTITCRASQSISSYLNWYQQKPGKAPKLLIYAASSLQSGVPSRFSGSGSGTDFTLTISSLQPEDFATYYCQQSYSTPYTFGQGTKLEIKRLGDYKDHDGDYKDHDIDYKDDDDKAAAHHHHHH* [SEQ |
| | ID NO: 265] |
| PAK-7 | EVQLLESGGGLVQPGGSLRLSCAASGFTFSGYSMSWVRQAPGKGLEWVSSISSSYSSTYYADSVKGRFTISRDNSKNTLYLQMNSLRAEDTAVYYCARGSFGFDYWGQGTLVTVSSGGGGSGGGGSGGGGSDIQMTQSPS |
| (1) | SLSASVGDRVTITCRASQSISSYLNWYQQKPGKAPKLLIYAASSLQSGVPSRFSGSGSGTDFTLTISSLQPEDFATYYCQQYYYGVLXTFGQGTKLEIKRLGDYKDHDGDYKDHDIDYKDDDDKAAAHHHHHH* [SEQ |
| | ID NO: 266] |
| PAK-7 | EVQLLESGGGLVQPGGSLRLSCAASGFTFYYSSMSWVRQAPGKGLEWVSGISGGYSSTYYADSVKGRFTISRDNSKNTLYLQMNSLRAEDTAVYYCARGFGVMDYWGQGTLVTVSSGGGGSGGGGSGGGGSDIQMTQSPS |
| (2) | SLSASVGDRVTITCRASQSISSYLNWYQQKPGKAPKLLIYAASSLQSGVPSRFSGSGSGTDFTLTISSLQPEDFATYYCQQSYSTPYTFGQGTKLEIKRLGDYKDHDGDYKDHDIDYKDDDDKAAAHHHHHH* [SEQ |
| | ID NO: 267] |
| PAK-7 | EVQLLESGGGLVQPGGSLRLSCAASGFTFSSYAMSWVRQAPGKGLEWVSYIYGPYSYTSYADSVKGRFTISRDNSKNTLYLQMNSLRAEDTAVYYCARGGYVFDYWGQGTLVTVSSGGGGSGGGGSGGGGSDIQMTQSPS |
| (3) | SLSASVGDRVTITCRASQSISSYLNWYQQKPGKAPKLLIYAASSLQSGVPSRFSGSGSGTDFTLTISSLQPEDFATYYCQQSYSTPYTFGQGTKLEIKRLGDYKDHDGDYKDHDIDYKDDDDKAAAHHHHHH* [SEQ |
| | ID NO: 268] |
| GEM | EVQLLESGGGLVQPGGSLRLSCAASGFTFYYSYMYWVRQAPGKGLEWVSAISGSGGSTYYADSVKGRFTISRDNSKNTLYLQMNSLRAEDTAVYYCARFYYYGFNGSFDYWGQGTLVTVSSGGGGSGGGGSGGGGSDIQM |
| (1) | TQSPSSLSASVGDRVTITCRASQSISSYLNWYQQKPGKAPKLLIYAASSLQSGVPSRFSGSGSGTDFTLTISSLQPEDFATYYCQQSYSTPYTFGQGTKLEIKRLGDYKDHDGDYKDHDIDYKDDDDKAAAHHHHHH* |
| | [SEQ ID NO: 269] |
| GEM | EVQLLESGGGLVQPGGSLRLSCAASGFTFYGSYMGWVRQAPGKGLEWVSGISSYSYSTYYADSVKGRFTISRDNSKNTLYLQMNSLRAEDTAVYYCARYSPFHWYFDYWGQGTLVTVSSGGGGSGGGGSGGGGSDIQMTQ |
| (2) | SPSSLSASVGDRVTITCRASQSISSYLNWYQQKPGKAPKLLIYAASSLQSGVPSRFSGSGSGTDFTLTISSLQPEDFATYYCQQSFRDPPHTFGQGTKLEIKRLGDYKDHDGDYKDHDIDYKDDDDKAAAHHHHHH* |
| | [SEQ ID NO: 270] |
| GNAI- | EVQLLEGGGLVQPGGSLRLSCAASGFTFSSYAMSWVRQAPGKGLEWVSYISGGYGYTSYADSVKGRFTISRDNSKNTLYLQMNSLRAEDTAVYYCARVVYDSSYFDYWGQGTLVTVSSGGGGSGGGGSGGGGSDIQMTQS |
| 3 (1) | PSSLSASVGDRVTITCRASQSISSYLNWYQQKPGKAPKLLIYAASSLQSGVPSRFSGSGSGTDFTLTISSLQPEDFATYYCQQAYYGFPSTFGQGTKLEIKRLGDYKDHDGDYKDHDIDYKDDDDKAAAHHHHHH* |
| | [SEQ ID NO: 271] |
| GNAI- | EVQLLESGGGLVQPGGSLRLSCAASGFTFSSSSMSWVRQAPGKGLEWVSGISGYGGGTGYADSVKGRFTISRDNSKNTLYLQMNSLRAEDTAVYYCARSSYFVYFDYWGQGTLVTVSSGGGGSGGGGSGGGGSDIQMTQS |
| 3 (2) | PSSLSASVGDRVTITCRASQSISSYLNWYQQKPGKAPKLLIYAASSLQSGVPSRFSGSGSGTDFTLTISSLQPEDFATYYCQQPYGYPYTFGQGTKLEIKRLGDYKDHDGDYKDHDIDYKDDDDKAAAHHHHHH* [SEQ |
| | ID NO: 272] |
| GNAI- | EVQLLESGGGLVQPGGSLRLSCAASGFTFYSSGMGWVRQAPGKGLEWVSSIGSSSGYTYYADSVKGRFTISRDNSKNTLYLQMNSLRAEDTAVYYCARVVWYDGGFDYWGQGTLVTVSSGGGGSGGGGSGGGGSDIQMTQ |
| 3 (3) | SPSSLSASVGDRVTITCRASQSISSYLNWYQQKPGKAPKLLIYAASSLQSGVPSRFSGSGSGTDFTLTISSLQPEDFATYYCQQSPYYYLPTFGQGTKLEIKRIGDYKDHDGDYKDHDIDYKDDDDKAAAHHHHHH* |
| | [SEQ ID NO: 273] |
| GNAI- | EVQLLESGGGLVQPGGSLRLSCAASGFTFSSSYMYWVRQAPGKGLEWVSSISSGYSSTYYADSVKGRFTISRDNSKNTLYLQMNSLRAEDTAVYYCARDVSHGGHSFLDYWGQGTLVTVSSGGGGSGGGGSGGGGSDIQM |
| 3 (4) | TQSPSSLSASVGDRVTITCRASQSISSYLNWYQQKPGKAPKLLIYAASSLQSGVPSRFSGSGSGTDFTLTISSLQPEDFATYYCQQADYYPPTFGQGTKLEIKRLGDYKDHDGDYKDHDIDYKDDDDKAAAHHHHHH* |
| | [SEQ ID NO: 274] |
| MAP2 | EVQLLESGGGLVQPGGSLRLSCAASGFTFYSYGMGWVRQAPGKGLEWVSYIYGSYGYTYYADSVKGRFTISRDNSKNTLYLQMNSLRAEDTAVYYCARSSYFDYWGQGTLVTVSSGGGGSGGGGSGGGGSDIQMTQSPSS |
| K-6 | LSASVGDRVTITCRASQSISSYLNWYQQKPGKAPKLLIYAASSLQSGVPSRFSGSGSGTDFILTISSLQPEDFATYYCQQSYSTPYTFGQGTKLEIKRLGDYKDHDGDYKDHDIDYKDDIDDKAAAHHHHHH* [SEQ |
| (1) | ID NO: 275] |
| MAP2 | EVQLLESGGGLVQPGGSLRLSCAASGFTFSSSSMHWVRQAPGKGLEWVSSISGYGYYTYYADSVKGRFTISRDNSKNTLYLQMNSLRAEDTAVYYCARYSYSPSAYYFDYVVGQGTLVTVSSGGGGSGGGGSGGGGSDIQ |
| K-6 | MTQSPSSLSASVGDRVTITCRASQSISSYLNWYQQKPGKAPKLLIYAASSLQSGVPSRFSGSGSGTDFTLTISSLQPEDFATYYCQQGYYLPTFGQGTKLEIKRLGDYKDHDGDYKDHDIDYKDDDDKAAAHHHHHH* |
| (2) | [SEQ ID NO: 276] |
| MAP2 | EVQLLESGGGLVQPGGSLRLSCAASGFTFYGSSMSWVRQAPGKGLEWVSGLSGYGYYTSYADSVKGRFTISRDNSKNTLYLQMNSLRAEDTAVYYCARYSASGFYFDYWGQGTLVTVSSGGGGSGGGGSGGGGSDIQMTQ |
| K-6 | SPSSLASVGDRVTITCRASQSISSYLNYVYQQKPGKAPKLLIYAASSLQSGVPSRFSGSGSGTDFTLTISSLQPEDFATYYCQQSYVYPLTFGQGTKLEIKRLGDYKDHDGDYKDHDIDYKDDDDKAAAHHHHHH* |
| (3) | [SEQ ID NO: 277] |
| MAP2 | EVQLLESGGGLVQPGGSLRLSCAASGFTFSSYSMGWVRQAPGKGLEWVSGLSSYGYYTYYADSVKGRFTISRDNSKNTLYLQMNSLRAEDTAVYYCARHYTTGYYIDYWGQGTLVTVSSGGGGSGGGGSGGGGSDIQMTQ |
| K-6 | SPSSLSASVGDRVTITCRASQSISSYLNWYQQKPGKAPKLLIYAASSLQSGVPSRFSGSGSGTDFTLTISSLQPEDFATYYCQQGFNVPYTFGQGTKLEIKRLGDYKDHDGDYKDHDIDYKDDDDKAAAHHHHHH* |
| (4) | [SEQ ID NO: 278] |
| MAP2 | EVQLLESGGGLVQPGGSLRLSCAASGFTFSSSYMYWVRQAPGKGLEWVSSISGGGYGTYYADSVKGRFTISRDNSKNTLYLQMNSLRAEDTAVYYCARAYPYVGSGIDYWGQGTLVTVSSGGGGSGGGGSGGGGSDIQMT |
| K-2 | QSPSSLSASVGDRVTITCRASQSISSYLNWYQQKPGKAPKLLIYAASSLQSGVPSRFSGSGSGTDFTLTISSLQPEDFATYYCQQGYSLPTFGQGTKLEIKRLGDYKDHDGDYKDHDIDYKDDDDKAAAHHHHHH* |
| (1) | [SEQ ID NO: 279] |
| MAP2 | EVQLLESGGGLVQPGGSLRLSCAASGFTFYYSYMGWVRQAPGKGLEWVSSISGSSYGTSYADSVKGRFTISRDNSKNTLYLQMNSLRAEDTAVYYCARGTGSVIDYWGQGTLVTVSSGGGGSGGGGSGGGGSDIQMTQSP |
| K-2 | SSLSASVGDRVTITCRASQSISSYLNWYQQKPGKAPKLLIYAASSLQSGVPSRFSGSGSGTDFTLTISSLQPEDFATYYCQQSYSTPYTFGQGTKLEIKRLGDYKDHDGDYKDHDIDYKDDDDKAAAHHHHHH* [SEQ |
| (2) | ID NO: 280] |
| MAP2 | EVQLLESGGGLVQPGGSLRLSCAASGFTEGYYMSWVRQAPGKGLEWVSSISSGGYGTGYADSVKGRFTISRDNSKNTLYLQMNSLRAEDTAVYYCARYGPYSLDYWGQGTLVTIVSSGGGGSGGGGSGGGGSDIQMTQSP |
| K-2 | SSLSASVGDRVTITCRASQSISSYLNWYQQKPGKAPKLLIYAASSLQSGVPSRFSGSGSGTDFTLTISSLQPEDFATYYCQQGAYYLFTFGQGTKLEIKRIGDYKDHDGDYKDHDIDYKDDDDKAAAHHHHHH* [SEQ |
| (3) | ID NO: 281] |
| KRAS | EVQLLESGGGLVQPGGSLRLSCAASGFTESGSYMYWVRQAPGKGLEWVSSIGSSYGYTYYADSVKGRFTISRDNSKNTLYLQMNSLRAEDTAVYYCARYGYFSFDYWGQGTLVTVSSGGGGSGGGGSGGGGSDIQMTQSP |
| | SSLSASVGDRVTITCRASQSISSYLNWYQQKPGKAPKLLIYAASSLQSGVPSRFSGSGSGTDFTLTISSLQPEDFATYYCQQDHYLSTFGQGTKLEIKRLGDYKDHDGDYKDHDIDYKDDDDKAAAHHHHHH* [SEQ |
| | ID NO: 282] |
| PTPR | EVQLLESGGGLVQPGGSLRLSCAASGFTFSYSGMGWVRQAPGKGLEWVSYISSYGYSTYYADSVKGRFTISRDNSKNTLYLQMNSLRAEDTAVYYCARSVSGGVIDYWGQGTLVTVSSGGGGSGGGGSGGGGSDIQMTQS |
| O (1) | PSSLSASVGDRVTITCRASQSIXXYLNWYQQKPGKAPKLLIYAAXSLQSGVPSRFSGSGSGTDFTLTISSLQPEDFATYYCQQWVHYPYTFGQGTKLEIKRLGDYKDHDGDYKDHDIDYKDDDDKAAAHHHHHH* [SEQ |
| | ID NO: 283] |
| PTPR | EVQLLESGGGLVQPGGSLRLSCAASGFTFSSYAMSWVRQAPGKGLEWVSALSGSGGSTYYADSVKGRFTISRDNSKNTLYLQMNSLRAEDTAVYYCARWGPWYAMDYWGQGTLVTVSSGGGGSGGGGSGGGGSDIQMTQS |
| O (2) | PSSLSASVGDRVTITCRASQSISSYLNWYQQKPGKAPKLLIYAASSLQSGVPSRFSGSGSGTDFTLTISSLQPEDFATYYCQQSHWSTWLHTFGQGTKLEIKRLGDYKDHDGDYKDHDIDYKDDDDKAAAHHHHHH* |
| | [SEQ ID NO: 284] |
| PTPR | EVQLLESGGGLVQPGGSLRLSCAASGFTFSGSYMYWVRQAPGKGLEWVSSISSGGYSKYYADSVKGRFTISRDNSKNTLYLQMNSLRAEDTAVYYCARWDYGHSHAFDYWGQGTLVTVSSGGGGSGGGGSGGGGSDIQMT |
| O (3) | QSPSSLSASVGDRVTITCRASQSISSYLNWYQQKPGKAPKLLIYAASSLQSGVPSRFSGSGSGTDFTLTISSLQPEDFATYYCQQXSXXPSTFGQGTKLEIKRLGDYKDHDGDYKDHDIDYKDDDDKAAAHHHHHH* |
| | [SEQ ID NO: 285] |
| PTPR | EVQLLESGGGLVQPGGSLRLSCAASGFTFSGYYXSWVRQAPGKGLEWVSSISGGSYSKSYADSVKGRFTISRDNSKNTLYLQMNSLRAEDTAVYYCARYSYYFDYWGQGTLVTVSSGGGGSGGGGSGGGGSDIQMTQSPS |
| O (4) | SLSASVGDRVTITCRASQSISSYLNWYQQKPGKAPKLLIYAASSLQSGVPSRFSGSGSGTDFTLTISSLQPEDFATYYCQQYAAYGLLTFGQGTKLEIKRLGDYKDHDGDYKDHDIDYKDDDDKAAAHHHHHH* [SEQ |
| | ID NO: 286] |
| PAR- | EVQLLESGGGLVQPGGSLRLSCAASGFTFSSYAMSWVRQAPGKGLEWVSAISGSGGSTYYADSVKGRFTISRDNSKNTLYLQMNSLRAEDTAVYYCARWNVWGHWGGPYSGVGLDYWGQGTLVTVSSGGGGSGGGGSGGG |
| 68 (1) | GSDIQMTQSPSSLSASVGDRVTITCRASQSISSYLNWYQQKPGKAPKLLIYAASSLQSGVPSRFSGSGSGTDFTLTISSLQPEDFATYYCQQPYYPFTFGQGTKLEIKRLGDYKDHDGDYKDHDIDYKDDDDKAAAHHHH |
| | HH* [SEQ ID NO: 287] |
| PAR- | EVQLLESGGGLVQPGGSLRLSCAASGFTFSYYYMYWVRQAPGKGLEWVSYIYSYYYGTYYADSVKGRFTISRDNSKNTLYLQMNSLRAEDTAVYYCARYAYYLDYWGQGTLVTVSSGGGGSGGGGSGGGGSDIQMTQSPS |
| 68 (2) | SLSASVGDRVTITCRASQSISSYLNWYQQKPGKAPKLLIYAASSLQSGVPSRFSGSGSGTDFTLTISSLQPEDFATYYCQQHWSYGLYTFGQGTKLEIKRLGDYKDHDGDYKDHDIDYKDDDDKAAAHHHHHH* [SEQ |
| | ID NO: 288] |
| PRD- | EVQLLESGGGLVQPGGSLRLSCAASGFTFGSYGMSWVRQAPGKGLEWVSSIYSGYSYTYYADSVKGRFTISRDNSKNTLYLQMNSLRAEDTAVYYCARHGPYRGPGSMDYWGQGTLVTVSSGGGGSGGGGSGGGGSDIQM |
| 14 (1) | TQSPSSLSASVGDRVTITCRASQSISSYLNWYQQKPGKAPKLLIYAASSLQSGVPSRFSGSGSGTDFTLTISSLQPEDFATYYCQQSWWLLTFGQGTKLEIKRLGDYKDHDGDYKDHDIDYKDDDDKAAAHHHHHH* |
| | [SEQ ID NO: 289] |
| PRD- | EVQLLESGGGLVQPGGSLRLSCAASGFTFYSGGMSWVRQAPGKGLEWVSSISGGYYYTYYADSVKGRFTISRDNSKNTLYLQMNSLRAEDTAVYYCARYVYGVGIDYWGQGTLVTVSSGGGGSGGGGSGGGGSDIQMTQS |
| 14 (2) | PSSLSASVGDRVTITCRASQSISSYLNWYQQKPGKAPKLLIYAASSLQSGVPSRFSGSGSGTDFTLTISSLQPEDFATYYCQQGYWLFTFGQGTKLEIKRLGDYKDHDGDYKDHDIDYKDDDDKAAAHHHHHH* [SEQ |
| | ID NO: 290] |
| PRD- | EVQLLESGGGLVQPGGSLRLSCAASGFTFSGYSMYWVRQAPGKGLEWVSSIYGYYGGTSYADSVKGRFTISRDNSKNTLYLQMNSLRAEDTAVYYCARGHPWFYMDYWGQGTLVTVSSGGGGSGGGGSGGGGSDIQMTQS |
| 14 (3) | PSSLSASVGDRVTITCRASQSISSYLNWYQQKPGKAPKLLIYAASSLQSGVPSRFSGSGSGTDFTLTISSLQPEDFATYYCQQSYWLYTFGQGTKLEIKRLGDYKDHDGDYKDHDIDYKDDDDKAAAHHHHHH* [SEQ |
| | ID NO: 291] |
| PRD- | EVQLLESGGGLVQPGGSLRLSCAASGFTFSGSSMSWVRQAPGKGLEWVSSIYYSYGYTYYADSVKGRFTISRDNSKNTLYLQMNSLRAEDTAVYYCARVGPWANYMDYWGQGTLVTVSSGGGGSGGGGSGGGGSDIQMTQ |
| 14 (4) | SPSSLSASVGDRVTITCRASQSISSYLNWYQQKPGKAPKLLIYAASSLQSGVPSRFSGSGSGTDFTLTISSLQPEDFATYYCQQSWSPHTFGQGTKLEIKRLGDYKDHDGDYKDHDIDYKDDDDKAAAHHHHHH* |
| | [SEQ ID NO: 292] |
| PRD- | EVQLLESGGGLVQPGGSLRLSCAASGFTFSSYAMSWVRQAPGKGLEWVSGIYGYYGSTGYADSVKGRFTLSRDNSKNTLYLQMNSLRAEDTAVYYCARGSNVLDYWGQGTLVTVSSGGGGSGGGGSGGGGSDIQMTQSPS |
| 14 (5) | SLSASVGDRVTITCRASQSISSYLNWYQQKPGKAPKLLIYAASSLQSGVPSRFSGSGSGTDFTLTISSLQPEDFATYYCQQGYGLSTFGQGTKLEIKRLGDYKDHDGDYKDHDIDYKDDDDKAAAHHHHHH* [SEQ ID |
| | NO: 293] |
| TOPB | EVQLLESGGGLVQPGGSLRLSCAASGFTFSGSSMSWVRQAPGKGLEWVSSISSGGSSTGYADSVKGRFTISRDNSKNTLYLQMNSLRAEDTAVYYCARFSWGHWSSFFDYWGQGTLVTVSSGGGGSGGGGSGGGGSDIQM |
| P-1 | TQSPSSLSASVGDRVTITCRASQSISSYLNWYQQKPGKAPKLLIYAASSLQSGVPSRFSGSGSGTDFTLTISSLQPEDFATYYCQQVYDLLTFGQGTKLEIKRLGDYKDHDGDYKDHDIDYKDDDDKAAAHHHHHH* |
| (1) | [SEQ ID NO: 294] |
| TOPB | EVQLLESGGGLVQPGGSLRLSCAASGFTFGSSSMSWVRQAPGKGLEWVSSISYGSSSTSYADSVKGRFTISRDNSKNTLYLQMNSLRAEDTAVYYCARGGYGFDYWGCLGTLVTVSSGGGGSGGGGSGGGGSDIQMTQSP |
| P-1 | SSLSASVGDRVTITCRASXXLNWYQQKPGKAPKLLIYXXXXSLQSGVPSRFSGSGSGTDFTLTISSLQPEDFATYYCQQGXXXGXXTFGQGTKLEIKRLGDYKDHDGDYKDHDIDYKDDDDKAAAHHHHHH* [SEQ ID |
| (2) | NO: 295] |
| USP-7 | EVQLLESGGGLVQPGGSLRLSCAASGFTFGSSSMYWVRQAPGKGLEWVSSISYYGYSTYYADSVKGRFTISRDNSKNTLYLQMNSLRAEDTAVYYCARGSGIDYWGQGTLVTVSSGGGGSGGGGSGGGGSDIQMTQSPSS |
| (1) | LSASVGDRVTITCRASQSISSYLNWYQQKPGKAPKLLIYAASSLQSGVPSRFSGSGSGTDFTLTISSLQPEDFATYYCQQWSVYGLYTFGQGTKLEIKRLGDYKDHDGDYKDHDIDYKDDDDKAAAHHHHHH* [SEQ |
| | ID NO: 296] |
| USP-7 | EVQLLESGGGLVQPGGSLRLSCAASGFTFGGSSMYWVRQAPGKGLEWVSGISYYGYSTYYADSVKGRFTISRDNSKNTLYLQMNSLRAEDTAVYYCARGHSLDYWGQGTLVTVSSGGGGSGGGGSGGGGSDIQMTQSPSS |
| (2) | LSASVGDRVTITCRASQSISSYLNWYQQKPGKAPKLLIYAASSLQSGVPSRFSGSGSGTDFTLTISSLQPEDFATYYCQQFSGYPHTFGQGTKLEIKRLGDYKDHDGDYKDHDIDYKDDDDKAAAHHHHHH* [SEQ ID |
| | NO: 297] |
| USP-7 | EVQLLESGGGLVQPGGSLRLSCAASGFTFGSYSMYWVRQAPGKGLEWVSGISGYSYYTSYADSVKGRFTISRDNSKNTLYLQMNSLRAEDTAVYYCARSYYMDYWGQGTLVTVSSGGGGSGGGGSGGGGSDIQMTQSPSS |
| (3) | LSASVGDRVTITCRASQSISSYLNWYQQKPGKAPKLLIYAASSLQSGVPSRFSGSGSGTDFTLTISSLQPEDFATYYCQQWDDSPHTFGQGTKLEIKRLGDYKDHDGDYKDHDIDYKDDDDKAAAHHHHHH* [SEQ ID |
| | NO: 298] |
| USP-7 | EVQLLESGGGLVQPGGSLRLSCAASGFTFSSYAMSWVRQAPGKGLEWVSAISGSGGSTYYADSVKGRFTISRDNSKNTLYLQMNSLRAEDTAVYYCARVYSYPGPSSWGYFSSIDYWGQGTLVTVSSGGGGSGGGGSGGG |
| (4) | GSDIQMTQSPSSLSASVGDRVTITCRASQSISSYLNWYQQKPGKAPKLLIYAASSLQSGVPSRFSGSGSGTDFTLTISSLQPEDFATYYCQQSYGYPHTFGCLGTKLEIKRLGDYKDHDGDYKDHDIDYKDDDDKAAAHH |
| | HHHH* [SEQ ID NO: 299] |
| PARP- | EVQLLESGGGLVQPGGSLRLSCAASGFTFSGSGMGWVRQAPGKGLEWVSYIGYYSSGTYYADSVKGRFTISRDNSKNTLYLQMNSLRAEDTAVYYCARHHSFGYLDYWGQGTLVTVSSGGGGSGGGGSGGGGSDIQMTQS |
| 1 | PSSLSASVGDRVTITCRASQSISSYLNWYQQKPGKAPKLLIYAASSLQSGVPSRFSGSGSGTDFTLTISSLQPEDFATYYCQQGVHWSLHTFGQGTKLEIKRLGDYKDHDGDYKDHDIDYKDDDDKAAAHHHHHH* |
| | [SEQ ID NO: 300] |
| GRIP- | EVQLLESGGGLVQPGGSLRLSCAASGFTFSSYAMSWVRQAPGKGLEWVSAISGSGGSTYYADSVKGRFTISRDNSKNTLYLQMNSLRAEDTAVYYCARIHFYGLDYWGQGTLVTVSSGGGGSGGGGSGGGGSDIQMTQSP |
| 2 (1) | SSLSASVGDRVTITCRASQSISSYLNWYQQKPGKAPKLLIYAASSLQSGVPSRFSGSGSGTDFTLTISSIQPEDFATYYCQQSYSTPYTFGQGTKLEIKRLGDYKDHDGDYKDHDIDYKDDDDKAAAHHHHHH* [SEQ |
| | ID NO: 301] |
| GRIP- | EVQLLESGGGLVQPGGSLRLSCAASGFTFSSYAMSWVRQAPGKGLEWVSAISGSGGSTYYADSVKGRFTISRDNSKNTLYLQMNSLRAEDTAVYYCARYVYYSYSYSFDYWGQGTLVTVSSGGGGSGGGGSGGGGSDIQM |
| 2 (2) | TQSPSSLSASVGDRVTITCRASQSISSYLNWYQQKPGKAPKLLIYAASSLQSGVPSRFSGSGSGTDFTLTISSLQPEDFATYYCQQSYYLPTFGQGTKLEIKRLGDYKDHDGDYKDHDIDYKDDDDKAAAHHHHHH* |
| | [SEQ ID NO: 302] |
| GRIP- | EVQLLESGGGLVQPGGSLRLSCAASGFTFSSYAMSWVRQAPGKGLEWVSAISGSGGSTYYADSVKGRFTISRDNSKNTLYLQMNSLRAEDTAVYYCARSFHGFDYWGQGTLVTVSSGGGGSGGGGSGGGGSDIQMTQSPS |
| 2 (3) | SLSASVGDRVTITCRASQSISSYLNWYQQKPGKAPKLLIYAASSLQSGVPSRFSGSGSGTDFTLTISSLQPEDFATYYCQQYYSDPLTFGQGTKLEIKRLGDYKDHDGDYKDHDIDYKDDDDKAAAHHHHHH* [SEQ |
| | ID NO: 303] |
| GRIP- | EVQLLESGGGLVQPGGSLRLSCAASGFTFSSYAMSWVRQAPGKGLEWVSAISGSGGSTYYADSVKGRFTISRDNSKNTLYLQMNSLRAEDTAVYYCARAHYGVIDYWGQGTLVTVSSGGGGSGGGGSGGGGSDIQMTQSP |
| 2 (4) | SSLSASVGDRVTITCRASQSISSYLNWYQQKPGKAPKLLIYAASSLQSGVPSRFSGSGSGTDFTLTISSLQPEDFATYYCQQYYGPFTFGQGTKLEIKRLGDYKDHDGDYKDHDIDYKDDDDKAAAHHHHHH* [SEQ |
| | ID NO: 304] |
| GRIP- | EVQLLESGGGLVQPGGSLRLSCAASGFTFSSYAMSWVRQAPGKGLEWVSAISGSGGSTYYADSVKGRFTISRDNSKNTLYLQMNSLRAEDTAVYYCARVGPSYYYIDYWGQGTLVTVSSGGGGSGGGGSGGGGSDIQMTQ |
| 2 (5) | SPSSLSASVGDRVTITCRASQSISSYLNWYQQKPGKAPKLLIYAASSLQSGVPSRFSGSGSGTDFTLTISSLQPEDFATYYCQQSYGPFTFGQGTKLEIKRLGDYKDHDGDYKDHDIDYKDDDDKAAAHHHHHH* |
| | [SEQ ID NO: 305] |
| GRIP- | EVQLLESGGGLVQPGGSLRLSCAASGFTFSSYAMSWVRQAPGKGLEWVSAISGSGGSTYYADSVKGRFTISRDNSKNTLYLQMNSLRAEDTAVYYCARSHASYFDYWGQGTLVTVSSGGGGSGGGGSGGGGSDIQMTQSP |
| 2 (6) | SSLSASVGDRVTITCRASQSISSYLNWYQQKPGKAPKLLIYAASSLQSGVPSRFSGSGSGTDFTLTISSLQPEDFATYYCQQGYYLLTFGQGTKLEIKRLGDYKDHDGDYKDHDIDYKDDDDKAAAHHHHHH* [SEQ |
| | ID NO: 306] |
| GRIP- | EVQLLESGGGLVQPGGSLRLSCAASGFTFSSYAMSWVRQAPGKGLEWVSAISGSGGSTYYADSVKGRFTISRDNSKNTLYLQMNSLRAEDTAVYYCARGSYMDYWGQGTLVTVSSGGGGSGGGGSGGGGSDIQMTQSPSS |
| 2 (7) | LSASVGDRVTITCRASQSISSYLNWYQQKPGKAPKLLIYAASSLQSGVPSRFSGSGSGTDFTLTISSLQPEDFATYYCQQSYGPPTFGQGTKLEIKRIGDYKDHDGDYKDHDIDYKDDDDKAAAHHHHHH* [SEQ ID |
| | NO: 307] |
| GRIP- | EVQLLESGGGLVQPGGSLRLSCAASGFTFSSYAMSWVRQAPGKGLEWVSAISGSGGSTYYADSVKGRFTISRDNSKNTLYLQMNSLRAEDTAVYYCARHSGPFFDYWGQGTLVTVSSGGGGSGGGGSGGGGSDIQMTQSP |
| 2 (8) | SSLSASVGDRVTITCRASQSISSYLNWYQQKPGKAPKLLIYAASSLQSGVPSRFSGSGSGTDFTLTISSLQPEDFATYYCQQGYSLHTFGQGTKLEIKRIGDYKDHDGDYKDHDIDYKDDDDKAAAHHHHHH* [SEQ |
| | ID NO: 308] |
| MAD2 | EVQLLESGGGLVQPGGSLRLSCAASGFTFGSSYMGWVRQAPGKGLEWVSGISGGGYGTYYADSVKGRFTISRDNSKNTLYLQMNSLRAEDTAVYYCARAPGGHYYGYFYFDYWGQGTLVTVSSGGGGSGGGGSGGGGSDI |
| L-1 (1) | QMTQSPSSLSASVGDRVTITCRASQSISSYLNWYQQKPGKAPKLLIYAASSLQSGVPSRFSGSGSGTDFTLTISSLQPEDFATYYCQQXXXXAHTFGQGTKLEIKRLGDYKDHDGDYKDHDIDYKDDDDKAAAHHHHHH* |
| | [SEQ ID NO: 309] |
| MAD2 | EVQLLESGGGLVQPGGSLRLSCAASGFTFYYSSMYWVRQAPGKGLEWVSGISSGGSGTYYADSVKGRFTISRDNSKNTLYLQMNSLRAEDTAVYYCARSFSYSSYLDYWGQGTLVTVSSGGGGSGGGGSGGGGSDIQMTQ |
| L-1 (2) | SPSSLSASVGDRVTITCRASQSISSYLNWYQQKPGKAPKLLIYAASSLQSGVPSRFSGSGSGTDFTLTISSLQPEDFATYYCQQGGXXPTFGQGTKLEIKRLGDYKDHDGDYKDHDIDYKDDDDKAAAHHHHHH* [SEQ |
| | ID NO: 310] |
| MAD2 | EVQLLESGGGLVQPGGSLRLSCAASGFTFYGSPMYWVRQAPGKGLEWVSYIGYGGYYTSYADSVKGRFTISRDNSKNTLYLQMNSLRAEDTAVYYCARGVYGFSIDYWGQGTLVTVSSGGGGSGGGGSGGGGSDIQMTQS |
| L-1 (3) | PSSLSASVGDRVTITCRASQSISSYLNWYQQKPGKAPKLLIYAASSLQSGVPSRFSGSGSGTDFTLTISSLQPEDFATYYCQQYYYPLTFGQGTKLEIKRIGDYKDHDGDYKDHDIDYKDDDDKAAAHHHHHH* [SEQ |
| | ID NO: 311] |
| NDC8 | EVQLLESGGGLVQPGGSLRLSCAASGFTFGYYYMSWVRQAPGKGLEWVSGIYSGSGSTSYADSVKGRFTISRDNSKNTLYLQMNSLRAEDTAVYYCARSPGYYYIDYWGQGTLVTVSSGGGGSGGGGSGGGGSDIQMTQS |
| 0 (1) | PSSLASVGDRVTITCRASQSISSYLNWYQQKPGKAPKLLIYAASSLQSGVPSRFSGSGSGTDFTLTISSLQPEDFATYYCQQSYSTPYTFGQGTKLEIKRLGDYKDHDGDYKDHDIDYKDDDDKAAAHHHHHH* [SEQ |
| | ID NO: 312] |
| NDC8 | EVQLLESGGGLVQPGGSLRLSCAASGFTFSGSSMYWVRQAPGKGLEWVSGIGSYGGYTYYADSVKGRFTISRDNSKNTLYLQMNSLRAEDTAVYYCARDGTAVGSYFYFDYWGQGTLVTVSSGGGGSGGGGSGGGGSDIQ |
| 0 (2) | MTQSPSSLSASVGDRVTITCRASQSISSYLNWYQQKPGKAPKLLIYAASSLQSGVPSRFSGSGSGTDFTLTISSLQPEDFATYYCQQYYYYPHTFGQGTKLEIKRLGDYKDHDGDYKDHDIDYKDDDDKAAAHHHHHH* |
| | [SEQ ID NO: 313] |
| NDC8 | EVQLLESGGGLVQPGGSLRLSCAASGFTFSSYAMSWVRQAPGKGLEWVSGIGSGGYYTSYADSVKGRFTISRDNSKNTLYLQMNSLRAEDTAVYYCARFYFVASPGGNLDYWGQGTLVTVSSGGGGSGGGGSGGGGSDIQ |
| 0 (3) | MTQSPSSLSASVGDRVTITCRASQSISSYLNWYQQKPGKAPKLLIYAASSLQSGVPSRFSGSGSGTDFTLTISSLQPEDFATYYCQQYSSPPTFGQGTKLEIKRLGDYKDHDGDYKDHDIDYKDDDDKAAAHHHHHH* |
| | [SEQ ID NO: 314] |
| Spindl | EVQLLESGGGLVQPGGSLRLSCAASGFTFSSYYMSWVRQAPGKGLEWVSSIDYSSYYTGYADSVKGRFTISRDNSKNTLYLQMNSLRAEDTAVYYCARGSYFDYWGQGTLVTVSSGGGGSGGGGSGGGGSDIQMTQSPSS |
| y (1) | LSASVGDRVTITCRASQSISSYLNWYQQKPGKAPKLLIYAASSLQSGVPSRFSGSGSGTDFTLTISSLQPEDFATYYCQQGSPLYTFGQGTKLEIKRLGDYKDHDGDYKDHDIDYKDDDDKAAAHHHHHH* [SEQ ID |
| | NO: 315] |
| Spindl | EVQLLESGGGLVQPGGSLRLSCAASGFTFYSYYMGWVRQAPGKGLEWVSSISYSGSGTYYADSVKGRFTISRDNSKNTLYLQMNSLRAEDTAVYYCARASYGTSYYYGYTIDYWGQGTLVTVSSGGGGSGGGGSGGGGSD |
| y (2) | IQMTQSPSSLSASVGDRVTITCRASQSISSYLNWYQQKPGKAPKLLIYAASSLQSGVPSRFSGSGSGTDFRTISSLQPEDFATYYCQQSYAGPSTFGQGTKLEIKRLGDYKDHDGDYKDHDIDYKDDDDKAAAHHHHHH* |
| | [SEQ ID NO: 316] |
| PTPRK | EVQLLESGGGLVQPGGSLRLSCAASGFTFSYSGMSWVRQAPGKGLEWVSSIGGSSSYTYYADSVKGRFTISRDNSKNTLYLQMNSLRAEDTAVYYCARYSWGYYDAIDYWGQGTLVTVSSGGGGSGGGGSGGGGSDIQMT |
| (1) | QSPSSLSASVGDRVTITCRASQSISSYLNWYQQKPGKAPKLLIYAASSLQSGVPSRFSGSGSGTDFTLTISSLQPEDFATYYCQQSWWGHALYTFGQGTKLEIKRLGDYKDHDGDYKDHDIDYKDDDDKAAAHHHHHH* |
| | [SEQ ID NO: 317] |
| PTPRK | EVQLLESGGGLVQPGGSLRLSCAASGFTFSYYGMSWVRQAPGKGLEWVSYISYYSGSTYYADSVKGRFTISRDNSKNTLYLQMNSLRAEDTAVYYCARSSWSSSFDYWGQGTLVTVSSGGGGSGGGGSGGGGSDIQMTQS |
| (2) | PSSLSASVGDRVTITCRASQSISSYLNWYQQKPGKAPKLLIYAASSLQSGVPSRFSGSGSGTDFTLTISSLQPEDFATYYCQQGYYGPFTFGQGTKLEIKRLGDYKDHDGDYKDHDIDYKDDDDKAAAHHHHHH* [SEQ |
| | ID NO: 318] |
| PTPRK | EVQLLESGGGLVQPGGSLRLSCAASGFTFSYSGMGWVRQAPGKGLEWVSSISYGSYGTYYADSVKGRFTISRDNSKNTLYLQMNSLRAEDTAVYYCARYYYNGYFDYWGQGTLVTVSSGGGGSGGGGSGGGGSDIQMTQS |
| (3) | PSSLSASVGDRVTITCRASQSISSYLNWYQQKPGKAPKLLIYAASSLQSGVPSRFSGSGSGTDFTLTISSLQPEDFATYYCQQYHYHSLFTFGQGTKLEIKRLGDYKDHDGDYKDHDIDYKDDDDKAAAHHHHHH* |
| | [SEQ ID NO: 319] |
| PTPRK | EVQLLEGGGLVQPGGSLRLSCAASGFTFSSSYMGWVRQAPGKGLEWVSSIYSGYYSTSYADSVKGRFTISRDNSKNTLYLQMNSLRAEDTAVYYCARWASPDNSYWYLDYWGQGTLVTVSSGGGGSGGGGSGGGGSDIQM |
| (4) | TQSPSSLSASVGDRVTITCRASQSISSYLNWYQQKPGKAPKLLIYAASSLQSGVPSRFSGSGSGTDFTLTISSLQPEDFATYYCQQAFYPHTFGQGTKLEIKRLGDYKDHDGDYKDHDIDYKDDDDKAAAHHHHHH* |
| | [SEQ ID NO: 320] |
| PTPRK | EVQLLESGGGLVQPGGSLRLSCAASGFTFYSSYMGWVRQAPGKGLEWVSGIGSYGSYTSYADSVKGRFTISRDNSKWLYLQMNSLRAEDTAVYYCARNWHRWFDYWGQGTLVTVSSGGGGSGGGGSGGGGSDIQMTQSPS |
| (5) | SLSASVGDRVTITCRASQSISSYLNWYQQKPGKAPKLLIYAASSLQSGVPSRFSGSGSGTDFTLTISSLQPEDFATYYCQQGYYYPYTFGQGTKLEIKRLGDYKDHDGDYKDHDIDYKDDDDKAAAHHHHHH* [SEQ |
| | ID NO: 321] |
| PTPRK | EVQLLESGGGLVQPGGSLRLSCAASGFTFGGYGMYWVRQAPGKGLEWVSSIYSGGSYTYYADSVKGRFTISRDNSKNTLYLQMNSLRAEDTAVYYCARGPGWVYGHSLDYWGQGTLVTVSSGGGGSGGGGSGGGGSDIQM |
| (6) | TQSPSSLSASVGDRVTITCRASQSISSYLNWYQQKPGKAPKLLIYAASSLQSGVPSRFSGSGSGTDFTLTISSLQPEDFATYYCQQYNYYGYSLFTFGQGTKLEIKRLGDYKDHDGDYKDHDIDYKDDDDKAAAHHHHHH* |
| | [SEQ ID NO: 322] |
| PTPRK | EVQLLESGGGLVQPGGSLRLSCAASGFTFYYSSMSWVRQAPGKGLEWVSSIGYGSGYTYYADSVKGRFTISRDNSKNTLYLQMNSLRAEDTAVYYCARVGASGSFDYWGQGTLVTVSSGGGGSGGGGSGGGGSDIQMTQS |
| (7) | PSSLSASVGDRVTITCRASQSISSYLNWYQQKPGKAPKLLIYAASSLQSGVPSRFSGSGSGTDFFLTISSLQPEDFATYYCQQYHYYSLYTFGQGTKLEIKRLGDYKDHDGDYKDHDIDYKDDDDKAAAHHHHHH* |
| | [SEQ ID NO: 323] |
| PTPRK | EVQLLESGGGLVQPGGSLRLSCAASGFTFSSSSMGWVRQAPGKGLEWVSYISGYSYYTYYADSVKGRFTISRDNSKNTLYLQMNSLRAEDTAVYYCARSSGTYGYYIDYWGQGTLVTVSSGGGGSGGGGSGGGGSDIQMT |
| (8) | DQSPSSLSASVGRVTITCRASQSISSYLNWYQQKPGKAPKLLIYAASSLQSGVPSRFSGSGSGTDFTLTISSLQPEDFATYYCQQGSYFPSTFGQGTKLEIKRLGDYKDHDGDYKDHDIDYKDDDDKAAAHHHHHH* |
| | [SEQ ID NO: 324] |
| PTPRT | EVQLLESGGGLVQPGGSLRLSCAASGFTFGGYSMSWVRQAPGKGLEWVSGISYGYGSTYYADSVKGRFTISRDNSKNTLYLQMNSLRAEDTAVYYCARGGPSYSMDYWGQGTLVTVSSGGGGSGGGGSGGGGSDIQMTQS |
| (1) | PSSLSASVGDRVTITCRASQSISSYLNWYQQKPGKAPKLLIYAASSLQSGVPSRFSGSGSGTDFTLTISSLQPEDFATYYCQQSAYLSTFGQGTKLEIKRLGDYKDHDGDYKDHDIDYKDDDDKAAAHHHHHH* [SEQ |
| | ID NO: 325] |
| PTPRT | EVQLLESGGGLVQPGGSLRLSCAASGFTFSSSGMYWVRQAPGKGLEWVSGIYSYGSYTSVADSVKGRFTISRDNSKNTLYLQMNSLRAEDTAVYYCARVNYFGIDYWGQGTLVTVSSGGGGSGGGGSGGGGSDIQMTQSP |
| (2) | SSLSASVGDRVITTCRASQSISSYLNWYQQKPGKAPKLLIYAASSLQSGVPSRFSGSGSGTDFTLTISSLQPEDFATYYCQQSWHSPPTFGQGTKLEIKRLGDYKDHDGDYKDHDIDYKDDDDKAAAHHHHHH* [SEQ |
| | ID NO: 326] |
| PTPRT | EVQLLESGGGLVQPGGSLRLSCAASGFTFSSYYMSWVRQAPGKGLEWVSGIYSGGSSTSVADSVKGRFTISRDNSKNTLYLQMNSLRAEDTAVYYCARWGSSDPPMDYWGQGTLVTVSSGGGGSGGGGSGGGGSDIQMTQ |
| (3) | SPSSLSASVGDRVTITCRASQSISSYLNINYQQKPGKAPKLLIYAASSLQSGVPSRFSGSGSGTDFTLTISSLQPEDFATYYCQQHAWSPYTFGQGTKLEIKRLGDYKDHDGDYKDHDIDYKDDDDKAAAHHHHHH* |
| | [SEQ ID NO: 327] |
| PGAM- | EVQLLESGGGLVQPGGSLRLSCAASGFTFYSSYMYWVRQAPGKGLEWVSGISSYGGSTSVADSVKGRFTISRDNSKNTLYLQMNSLRAEDTAVYYCARYGPGSVFDYWGQGTLVTVSSGGGGSGGGGSGGGGSDIQMTQS |
| 5 (1) | PSSLSASVGDRCTITCRASQSISSYLNWYQQKPGKAPKLLIYAASSLQSGVPSRFSGSGSGTDFTLTISSLQPEDFATYYCQQVYVAYSYPYTFGQGTGQGTKLEIKRLGDYKDHDGDYKDHDIDYKDDDDKAAAHHHHH |
| | H* [SEQ ID NO: 328] |
| PGAM- | EVQLLESGGGLVQPGGSLRLSCAASGFTFSGSYMYWVRQAPGKGLEWVSGISSSGDYTSVADSVKGRFTISRDNSKNTLYLQMNSLRAEDTAVYYCARVGYHSFFDYWGQGTLVTVSSGGGGSGGGGSGGGGSDIQMTQS |
| 5 (2) | PSSLSASVGDRVTITCRASQSISSYLNWYQQKPGKAPKLLIYAASSLQSGVPSRFSGSGSGTDFTLTISSLQPEDFATWCQQYYWYLHTFGQGTKLEIKRLGDYKDHDGDYKDHDIDYKDDDDKAAAHHHHHH* [SEQ |
| | ID NO: 329] |
| PGAM- | EVQLLESGGGLVQPGGSLRLSCAASGFTFYSYGMSWVRQAPGKGLEWVSSISYGSYYTYYADSVKGRFTISRDNSKNTLYLQMNSLRAEDTAVYYCARGYGYLDYWGQGTLVTVSSGGGGSGGGGSGGGGSDIQMTQSPS |
| 5 (3) | SLSASVGDRVTITCRASQSISSYLNWYQQKPGKAPKLLIYAASSLQSGVPSRFSGSGSGTDFTLTISSLQPEDFATYYCQQYYYYPHTFGQGTKLEIKRLGDYKDHDGDYKDHDIDYKDDDDKAAAHHHHHH* [SEQ |
| | ID NO: 330] |
| PGAM- | EVQLLESGGGLVQPGGSLRLSCAASGFTFGGYSMGWVRQAPGKGLEWVSSISSYSSYTYYADSVKGRFTISRDNSKNTLYLQMNSLRAEDTAVYYCARSYSFGPWLDYWGQGTLVTVSSGGGGSGGGGSGGGGSDIQMTQ |
| 5 (4) | SPSSLSASVGDRVTITCRASQSISSYLNWYQQKPGKAPKLLIYAASSLQSGVPSRFSGSGSGTDFTLTISSLQPEDFATYYCQQGYYLFTFGQGTKLEIKRLGDYKDHDGDYKDHDIDYKDDDDKAAAHHHHHH* [SEQ |
| | ID NO: 331] |
| PTPRJ | EVQLLESGGGLVQPGGSLRLSCAASGFTFSSYAMSWVRQAPGKGLEWVSYISSSGGYTYYADSVKGRFTISRDNSKNTLYLQMNSLRAEDTAVYYCARWAPWPYGYSMDYWGQGTLVTVSSGGGGSGGGGSGGGGSDIQM |
| (1) | TQSPSSLSASVGDRVTITCRASQSISSYLNWYQQKPGKAPKLLIYAASSLQSGVPSRFSGSGSGTDFTLTISSLQPEDFATYYCQQSSYSLSTFGQGTKLEIKRLGDYKDHDGDYKDHDIDYKDDDDKAAAHHHHHH* |
| | [SEQ ID NO: 332] |
| PTPRJ | EVQLLESGGGLVQPGGSLRLSCAASGFTFSGGSMSWVRQAPGKGLEWVSSIGYYSGYTSVADSVKGRFTISRDNSKNTLYLQMNSLRAEDTAVYYCARGYYYFDYWGQGTLVTVSSGGGGSGGGGSGGGGSDIQMTQSPS |
| (2) | SLSASVGDRVTITCRASQSISSYLNWYQQKPGKAPKLLIYAASSLQSGVPSRFSGSGSGTDFTLTISSLQPEDFATYYCQQGHGYLFTFGQGTKLEIKRIGDYKDHDGDYKDHDIDYKDDDDKAAAHHHHHH* [SEQ |
| | ID NO: 333] |
| PTPRJ | EVQLLESGGGLVQPGGSLRLSCAASGFTFSSYAMSWVRQAPGKGLEWVSYISSSSSSTSVADSVKGRFTISRDNSKNTLYLQMNSLRAEDTAVYYCARYWHSHYLDYWGQGTLVTVSSGGGGSGGGGSGGGGSDIQMTQS |
| (3) | PSSLSASVGDRVTITCRASQSISSYLNWYQQKPGKAPKLLIYAASSLQSGVPSRFSGSGSGTDFTLTISSLQPEDFATYYCQQYWYPYTFGQGTKLEIKRLGDYKDHDGDYKDHDIDYKDDDDKAAAHHHHHH* [SEQ |
| | ID NO: 334] |
| PTPRJ | EVQLLESGGGLVQPGGSLRLSCAASGFTFSYSYMGWVRQAPGKGLEWVSGIYGYGYSTYADSVKGRFTISRDNSKNTLYLQMNSLRAEDTAVYYCARGVWMDYWGQGTLVTVSSGGGGSGGGGSGGGGSDIQMTQSPSSL |
| (4) | SASVGDRVTITCRASQSISSYLNWYQQKPGKAPKLLIYAASSLQSGVPSRFSGSGSGTDFTLTISSLQPEDFATYYCQQNHSLYTFGQGTKLEIKRIGDYKDHDGDYKDHDIDYKDDDDKAAAHHHHHH* [SEQ ID |
| | NO: 335] |
| PTPRJ | EVQLLESGGGLVQPGGSLRLSCAASGFTFYGSYMSWVRQAPGKGLEWVSSIYSGGGYTYYADSVKGRFTISRDNSKNTLYLQMNSLRAEDTAVYYCARSSRYYYMDYWGQGTLVTVSSGGGGSGGGGSGGGGSDIQMTQS |
| (5) | PSSLSASVGDRVTITCRASQSISSYLNWYQQKPGKAPKLLIYAASSLQSGVPSRFSGSGSGTDFTLTISSLQPEDFATYYCQQSWVPHTFGQGTKLEIKRLGDYKDHDGDYKDHDIDYKDDDDICAAAHHHHHH* [SEQ |
| | ID NO: 336] |
| PTPRJ | EVQLLESGGGLVQPGGSLRLSCAASGFTFGSYSMYWVRQAPGKGLEWVSSISSSSYGTYYADSVKGRFTISRDNSKNTLYLQMNSLRAEDTAVYYCARGVFLDYWGQGTLVTVSSGGGGSGGGGSGGGGSDIQMTQSPSS |
| (6) | TLSASVGDRVTICRASQSISSYLNWYQQKPGKAPKLLIYAASSLQSGVPSRFSGSGSGTDFTLTISSLQPEDFATYYCQQGYYSLYTFGQGTKLEIKRLGDYKDHDGDYKDHDIDYKDDDDKAAAHHHHHH* [SEQ ID |
| | NO: 337] |
| PTPRJ | EVQLLESGGGLVQPGGSLRLSCAASGFTFSSGGMSWVRQAPGKGLEWVSSIYYSSSSTVADSVKGRFTISRDNSKNTLYLQMNSLRAEDTAVYYCARGYGYYMDYWGQGTLVTVSSGGGGSGGGGSGGGGSDIQMTQSPS |
| (7) | SLSASVGDRVTITCRASQSISSYLNWYQQKPGKAPKLLIYAASSLQSGVPSRFSGSGSGTDFTLTISSLQPEDFATYYCQQGSVAYLSTFGQGTKLEIKRLGDYKDHDGDYKDHDIDYKDDDDICAAAHHHHHH* [SEQ |
| | ID NO: 338] |
| PTPRJ | EVQLLESGGGLVQPGGSLRLSCAASGFTFSSGGMYWVRQAPGKGLEWVSSIYGSSSSTYYADSVKGRFTISRDNSKNTLYLQMNSLRAEDTAVYYCARGPYASGYYYLDYWGQGTLVTVSSGGGGSGGGGSGGGGSDIQM |
| (8) | TQSPSSLSASVGDRVTITCRASQSISSYLNWYQQKPGKAPKLLIYAASSLQSGVPSRFSGSGSGTDFTLTISSLQPEDFATYYCQQVNYSSSYPFTFGQGTKLEIKRLGDYKDHDGDYKDHDIDYKDDDDKAAAHHHHHH* |
| | [SEQ ID NO: 339] |

*The structure of the scFv antibodies is described in Soderlind et al., 2000, ‘Recombining germline-derived CDR sequences for creating diverse single-framework antibody libraries’ Nature Biotechnol., 18(8): 852-6, which is incorporated herein by reference in its entirety.

1. A method for diagnosing or determining a pancreatic cancer-associated disease state comprising or consisting of the steps of:
(a) providing a sample from an individual to be tested; and
(b) determining a biomarker signature of the test sample by measuring the presence and/or amount in the test sample of one or more biomarker selected from the group defined in Table A;
wherein the presence and/or amount in the test sample of the one or more biomarker selected from the group defined in Table A is indicative of the pancreatic cancer-associated disease in the individual.

2. The method according to claim 1 wherein the pancreatic cancer-associated disease state is selected from the group consisting of:
(i) diagnosis and/or staging of early pancreatic cancer;
(ii) diagnosis and/or staging of pancreatic cancer; and

3. The method according to any one of claims 1-2 wherein step (b) comprises or consists of measuring the presence and/or amount of 1 or more biomarker listed in Table A, for example at least 2, 3, 4, 5, 6, 7, 8, 9, 10, 11, 12, 13, 14, 15, 16, 17, 18, 19, 20, 21, 22, 23, 24, 25, 26, 27, 28, 29, 30, 31, 32, 33, 34, 35, 36, 37, 38, 39, 40, 41, 42, 43, 44, 45, 46, 47, 48, 49, 50, 51, 52, 53, 54, 55, 56, 57, 58, 59, 60, 61, 62, 63, 64, 65, 66, 67, 68, 69, 70, 71, 72, 73, 74, 75, 76, 77, 78, 79, 80, 81, 82, 83, 84 or 85 of the biomarkers listed in Table A.

4. The method according to any one of the preceding claims wherein the pancreatic cancer-associated disease state is early pancreatic cancer.

5. The method according to claim 4 wherein the method is for the diagnosis of stage I or stage II pancreatic cancer.

6. The method according to claim 5 wherein step (b) comprises or consists of measuring the presence and/or amount of 1 or more biomarker listed in:
(i) Table A(I), for example at least 2, 3, 4 or 5 of the biomarkers listed in Table A(I);
(ii) Table A(III), for example at least 2, 3, 4, 5 or 6 of the biomarkers listed in Table A(III);
(iii) Table A(V), for example at least 2, 3, 4, 5 or 6 of the biomarkers listed in Table A(V); and
(iv) Table A(XI), for example at least 2 or 3 of the biomarkers listed in Table A(XI).

7. The method according to claim 5 or 6 wherein step (b) comprises or consists of measuring the presence and/or amount of 1 or more biomarker listed in:
(i) Table A(II), for example at least 2, 3, 4, 5, 6, 7, 8, 9, 10, 11, 12, 13, 14, 15 or 16 of the biomarkers listed in Table A(II);
(ii) Table A(IV), for example at least 2, 3, 4, 5, 6, 7, 8, 9, 10, 11 or 12 of the biomarkers listed in Table A(IV);
(iii) Table A(VI), for example at least 2, 3, 4, 5, 6, 7, 8, 9, 10, 11, 12 or 13 of the biomarkers listed in Table A(VI); and
(iv) Table A(XII), for example at least 2, 3, 4, 5 or 6 of the biomarkers listed in Table A(XII).

8. The method according to claim 4 wherein the method is for the diagnosis of stage I pancreatic cancer.

9. The method according to claim 8 wherein step (b) comprises or consists of measuring the presence and/or amount of 1 or more biomarker listed in:
(i) Table A(I), for example at least 2, 3, 4 or 5 of the biomarkers listed in Table A(I);
(ii) Table A(III), for example at least 2, 3, 4, 5 or 6 of the biomarkers listed in Table A(III);
(iii) Table A(VII).

10. The method according to claim 8 or 9 wherein step (b) comprises or consists of measuring the presence and/or amount of 1 or more biomarker listed in:
(i) Table A(II), for example at least 2, 3, 4, 5, 6, 7, 8, 9, 10, 11, 12, 13, 14, 15 or 16 of the biomarkers listed in Table A(II);
(ii) Table A(IV), for example at least 2, 3, 4, 5, 6, 7, 8, 9, 10, 11 or 12 of the biomarkers listed in Table A(IV); and
(iii) Table A(VIII), for example at least 2, 3, 4, 5 or 6 of the biomarkers listed in Table A(VIII).

11. The method according to claim 4 wherein the method is for the diagnosis of stage II pancreatic cancer.

12. The method according to claim 11 wherein step (b) comprises or consists of measuring the presence and/or amount of 1 or more biomarker listed in:
(iv) Table A(I), for example at least 2, 3, 4 or 5 of the biomarkers listed in Table A(I);
(v) Table A(V), for example at least 2, 3, 4, 5 or 6 of the biomarkers listed in Table A(V);
(vi) Table A(IX).

13. The method according to claim 11 or 12 wherein step (b) comprises or consists of measuring the presence and/or amount of 1 or more biomarker listed in:
(iv) Table A(II), for example at least 2, 3, 4, 5, 6, 7, 8, 9, 10, 11, 12, 13, 14, 15 or 16 of the biomarkers listed in Table A(II);
(v) Table A(VI), for example at least 2, 3, 4, 5, 6, 7, 8, 9, 10, 11, 12 or 13 of the biomarkers listed in Table A(VI); and
(vi) Table A(X), for example at least 2, 3 or 4 of the biomarkers listed in Table A(X).

14. The method according to any one of the preceding claims wherein the pancreatic cancer-associated disease state is pancreatic cancer.

15. The method according to claim 14 wherein step (b) comprises or consists of measuring the presence and/or amount of 1 or more biomarker selected from the group consisting of CHP-1, MAPKK 2, UBP7, PRD14, STAT1, AGAP-2, PGAM5, LUM, PTPRO and USP07, for example, at least 2, 3, 4, 5, 6, 7, 8, 9 or 10 of these biomarkers.

16. The method according to claim 14 or 15 wherein step (b) comprises or consists of measuring the presence and/or amount of 1 or more biomarker selected from the group consisting of Apo-A1, BTK, C1q, C5, CDK-2, IgM, IL-11, IL-12, IL-6, JAK3, MAPK8, MCP-1, MUC-1, Properdin, VEGF, C3, ICAM-1, IL-13, ATP-5B, C4, Her2/ErB-2, IL-7, IL-3, IL-8, GM-CSF, IL-9, LDL and ORP3 for example, at least 2, 3, 4, 5, 6, 7, 8, 9, 10, 11, 12, 13, 14, 15, 16, 17, 18, 19, 20, 21, 22, 23, 24, 25, 26, 27, 28 or 29 of these biomarkers.

17. The method according to any one of the preceding claims wherein step (b) comprises measuring the presence and/or amount of all of the biomarkers listed in Table A.

18. The method according to any one of the preceding claims further comprising or consisting of the steps of:
c) providing one or more control sample from:
i. an individual not afflicted with pancreatic cancer; and/or
ii. an individual afflicted with pancreatic cancer, wherein the sample was of a different stage to that of that the test sample;
d) determining a biomarker signature of the one or more control sample by measuring the presence and/or amount in the control sample of the one or more biomarkers measured in step (b);
wherein the pancreatic cancer-associated disease state is identified in the event that the presence and/or amount in the test sample of the one or more biomarkers measured in step (b) is different from the presence and/or amount in the control sample of the one or more biomarkers measured in step (d).

19. The method according to any one of the preceding claims further comprising or consisting of the steps of:
e) providing one or more control sample from;
i. an individual afflicted with pancreatic cancer (i.e., a positive control); and/or
ii. an individual afflicted with pancreatic cancer, wherein the sample was of the same stage to that of that the test sample;
f) determining a biomarker signature of the control sample by measuring the presence and/or amount in the control sample of the one or more biomarkers measured in step (b);
wherein the pancreatic cancer-associated disease state is identified in the event that the presence and/or amount in the test sample of the one or more biomarkers measured in step (b) corresponds to the presence and/or amount in the control sample of the one or more biomarkers measured in step (f).

20. The method according to any of claims 18-19, wherein the individual from which the one or more control sample was obtained was not, at the time the sample was obtained, afflicted with a non-cancerous pancreatic disease or condition, for example acute pancreatitis, chronic pancreatitis and autoimmune pancreatitis and Intraductal Papillary Mucinous Neoplasia (IPMN) of the Pancreas.

21. The method according to any of claims 18-20, wherein the individual frorri which the one or more control sample was obtained was not, at the time the sample was obtained, afflicted with any disease or condition of the pancreas.

22. The method according to claim 18, wherein the individual not afflicted with pancreatic cancer was not, at the time the sample was obtained, afflicted with any disease or condition.

23. The method according to claim 18 wherein the individual not afflicted with pancreatic cancer is a healthy individual.

24. The method according to any one of claims 18-23 wherein the one or more individual afflicted with pancreatic cancer is afflicted with a pancreatic cancer selected from the group consisting of adenocarcinoma (e.g., pancreatic ductal adenocarcinoma or tubular papillary pancreatic adenocarcinoma), pancreatic sarcoma, malignant serous cystadenoma, adenosquamous carcinoma, signet ring cell carcinoma, hepatoid carcinoma, colloid carcinoma, undifferentiated carcinoma, and undifferentiated carcinomas with osteoclast-like giant cells.

25. The method according to any one of the preceding claims wherein the pancreatic cancer is pancreatic adenocarcinoma (e.g., pancreatic ductal adenocarcinoma).

26. The method according to any one of the preceding claims wherein the method is repeated.

27. The method according to any one of the preceding claims wherein the method is repeated and wherein, in step (a), the sample to be tested is taken at different time to the previous method repetition.

28. The method according to claim 26 or 27 wherein the method is repeated using a test sample taken at a different time period to the previous test sample(s) used.

29. The method according to claim 27 or 28 wherein the method is repeated using a test sample taken between 1 day to 104 weeks to the previous test sample(s) used, for example, between 1 week to 100 weeks, 1 week to 90 weeks, 1 week to 80 weeks, 1 week to 70 weeks, 1 week to 60 weeks, 1 week to 50 weeks, 1 week to 40 weeks, 1 week to 30 weeks, 1 week to 20 weeks, 1 week to 10 weeks, 1 week to 9 weeks,1 week to 8 weeks, 1 week to 7 weeks, 1 week to 6 weeks, 1 week to 5 weeks, 1 week to 4 weeks, 1 week to 3 weeks, or 1 week to 2 weeks.

30. The method according to claim 27 or 28 wherein the method is repeated using a test sample taken every period from the group consisting of: 1 day, 2 days, 3 day, 4 days, 5 days, 6 days, 7 days, 10 days, 2 weeks, 3 weeks, 4 weeks, 5 weeks, 6 weeks, 7 weeks, 8 weeks, 9 weeks, 10 weeks, 15 weeks, 20 weeks, 25 weeks, 30 weeks, 35 weeks, 40 weeks, 45 weeks, 50 weeks, 55 weeks, 60 weeks, 65 weeks, 70 weeks, 75 weeks, 80 weeks, 85 weeks, 90 weeks, 95 weeks, 100 weeks, 104, weeks, 105 weeks, 110 weeks, 115 weeks, 120 weeks, 125 weeks and 130 weeks.

31. The method according to any one of claims 26-30 wherein the method is repeated at least once, for example, 2 times, 3 times, 4 times, 5 times, 6 times, 7 times, 8 times, 9 times, 10 times, 11 times, 12 times, 13 times, 14 times, 15 times, 16 times, 17 times, 18 times, 19 times, 20 times, 21 times, 22 times, 23, 24 times or 25 times.

32. The method according to any one of claims 26-30 wherein the method is repeated continuously.

33. The method according to any one of claims 26-30 wherein the method is repeated until pancreatic cancer is diagnosed in the individual using conventional clinical methods.

34. The method according to any one of claims 26-30 wherein each repetition uses test sample taken from the same individual.

35. The method according to any one of claims 1 to 34 wherein step (b) comprises measuring the expression of the protein or polypeptide of the one or more biomarker(s)

36. The method according to any one of the preceding claims wherein step (b), (d) and/or step (f) is performed using one or more first binding agent capable of binding to a biomarker listed in Table A.

37. The method according to claim 36 wherein the first binding agent comprises or consists of an antibody or an antigen-binding fragment thereof.

38. The method according to claim 37 wherein the antibody or antigen-binding fragment thereof is a recombinant antibody or antigen-binding fragment thereof.

39. The method according to claim 37 or 38 wherein the antibody or antigen-binding fragment thereof is selected from the group consisting of: scFv; Fab; a binding domain of an immunoglobulin molecule.

40. The method according to any one of claims 36 to 39 wherein the first binding agent is immobilised on a surface.

41. The method according to any one of claims 36 to 40 wherein the one or more biomarkers in the test sample are labelled with a detectable moiety.

42. The method according to any one of claims 36 to 41 wherein the one or more biomarkers in the control sample(s) are labelled with a detectable moiety.

43. The method according to claim 41 or 42 wherein the detectable moiety is selected from the group consisting of: a fluorescent moiety; a luminescent moiety; a chemiluminescent moiety; a radioactive moiety; an enzymatic moiety.

44. The method according to claim 41 or 42 wherein the detectable moiety is biotin.

45. The method according to any one of claims 36 to 44 wherein step (b), (d) and/or step (f) is performed using an assay comprising a second binding agent capable of binding to the one or more biomarkers, the second binding agent comprising a detectable moiety.

46. The method according to any one of claim 45 wherein the second binding agent comprises or consists of an antibody or an antigen-binding fragment thereof.

47. The method according to claim 46 wherein the antibody or antigen-binding fragment thereof is a recombinant antibody or antigen-binding fragment thereof.

48. The method according to claim 46 or 47 wherein the antibody or antigen-binding fragment thereof is selected from the group consisting of: scFv; Fab; a binding domain of an immunoglobulin molecule.

49. The method according to any one of claims 46 to 48 wherein the detectable moiety is selected from the group consisting of: a fluorescent moiety; a luminescent moiety; a chemiluminescent moiety; a radioactive moiety; an enzymatic moiety.

50. The method according to claim 49 wherein the detectable moiety is fluorescent moiety (for example an Alexa Fluor dye, e.g. Alexa647).

51. The method according to any one of the preceding claims wherein the method comprises or consists of an ELISA (Enzyme Linked Immunosorbent Assay).

52. The method according to any one of the preceding claims wherein step (b), (d) and/or step (f) is performed using an array.

53. The method according to claim 52 wherein the array is a bead-based array.

54. The method according to claim 53 wherein the array is a surface-based array.

55. The method according to any one of claims 52 to 54 wherein the array is selected from the group consisting of: macroarray; microarray; nanoarray.

56. The method according to any one of the preceding claims wherein the method comprises:
(i) labelling biomarkers present in the sample with biotin;
(ii) contacting the biotin-labelled proteins with an array comprising a plurality of scFv immobilised at discrete locations on its surface, the scFv having specificity for one or more of the proteins in Table A;
(iii) contacting the immobilised scFv with a streptavidin conjugate comprising a fluorescent dye; and
(iv) detecting the presence of the dye at discrete locations on the array surface
wherein the expression of the dye on the array surface is indicative of the expression of a biomarker from Table III in the sample.

57. The method according to any one of claims 1 to 34 wherein, step (b), (d) and/or (f) comprises measuring the expression of a nucleic acid molecule encoding the one or more biomarkers.

58. The method according to claim 57, wherein the nucleic acid molecule is a cDNA molecule or an mRNA molecule.

59. The method according to claim 58, wherein the nucleic acid molecule is an mRNA molecule.

60. The method according to claim 57, 58 or 59, wherein measuring the expression of the one or more biomarker(s) in step (b), (d) and/or (f) is performed using a method selected from the group consisting of Southern hybridisation, Northern hybridisation, polymerase chain reaction (PCR), reverse transcriptase PCR (RT-PCR), quantitative real-time PCR (qRT-PCR), nanoarray, microarray, macroarray, autoradiography and in situ hybridisation.

61. The method according to any one of claims 57-60, wherein measuring the expression of the one or more biomarker(s) in step (b) is determined using a DNA microarray.

62. The method according to any one of claims 57-61, wherein measuring the expression of the one or more biomarker(s) in step (b), (d) and/or (f) is performed using one or more binding moieties, each individually capable of binding selectively to a nucleic acid molecule encoding one of the biomarkers identified in Table A.

63. The method according to claim 62, wherein the one or more binding moieties each comprise or consist of a nucleic acid molecule.

64. The method according to claim 63 wherein, the one or more binding moieties each comprise or consist of DNA, RNA, PNA, LNA, GNA, TNA or PMO.

65. The method according to claim 63 or 64, wherein the one or more binding moieties each comprise or consist of DNA.

66. The method according to any one of claims 63-65 wherein the one or more binding moieties are 5 to 100 nucleotides in length.

67. The method according to any one of claims 63-65 wherein the one or more nucleic acid molecules are 15 to 35 nucleotides in length.

68. The method according to any one of claims 63-67 wherein the binding moiety comprises a detectable moiety.

69. The method according to claim 68 wherein the detectable moiety is selected from the group consisting of: a fluorescent moiety; a luminescent moiety; a chemiluminescent moiety; a radioactive moiety (for example, a radioactive atom); or an enzymatic moiety.

70. The method according to claim 69 wherein the detectable moiety comprises or consists of a radioactive atom.

71. The method according to claim 70 wherein the radioactive atom is selected from the group consisting of technetium-99m, iodine-123, iodine-125, iodine-131, indium-111, fluorine-19, carbon-13, nitrogen-15, oxygen-17, phosphorus-32, sulphur-35, deuterium, tritium, rhenium-186, rhenium-188 and yttrium-90.

72. The method according to claim 69 wherein the detectable moiety of the binding moiety is a fluorescent moiety.

73. The method according to any one of the preceding claims wherein, the sample provided in step (a), (c) and/or (e) is selected from the group consisting of unfractionated blood, plasma, serum, tissue fluid, pancreatic tissue, milk, bile and urine.

74. The method according to claim 73, wherein the sample provided in step (a), (c) and/or (e) is selected from the group consisting of unfractionated blood, plasma and serum.

75. The method according to claim 73 or 74, wherein the sample provided in step (a), (c) and/or (e) is serum.

76. The method according to any one of the preceding claims wherein the predicative accuracy of the method, as determined by an ROC AUC value, is at least 0.50, for example at least 0.55, 0.60, 0.65, 0.70, 0.75, 0.80, 0.85, 0.90, 0.95, 0.96, 0.97, 0.98 or at least 0.99.

77. The method according to claim 76 wherein the predicative accuracy of the method, as determined by an ROC AUC value, is at least 0.70.

78. The method according to any one of the preceding claims wherein, in the event that the individual is diagnosed with pancreatic cancer, the method comprises the step of:
(g) providing the individual with pancreatic cancer therapy.

79. The method according to claim 78 wherein the pancreatic cancer therapy is selected from the group consisting of surgery, chemotherapy, immunotherapy, chemoimmunotherapy and thermochemotherapy.

80. An array for determining the presence of pancreatic cancer in an individual comprising one or more binding agent as defined in any one of claims 36-51 and 64-72.

81. The array according to claim 80 wherein the one or more binding agents is capable of binding to all of the proteins defined in Table A.

82. Use of one or more biomarkers selected from the group defined in Table A as a biomarker for determining the presence of pancreatic cancer in an individual.

83. The use according to claim 82 wherein all of the proteins defined in Table A is used as a diagnostic marker for determining the presence of pancreatic cancer in an individual.

84. The use of one or more binding moiety as defined in any one of claims 36-51 and 64-72 for determining the presence of pancreatic cancer in an individual.

85. The use according to claim 84 wherein biomarkers for all of the proteins defined in Table A are used.

86. A kit for determining the presence of pancreatic cancer comprising:
A) one or more binding agent as defined in any one of claims 36-51 and 64-72 or an array according to claims 80-81;
B) instructions for performing the method as defined in any one of claims 1-79.

87. A method of treating pancreatic cancer in an individual comprising the steps of:
(a) diagnosing pancreatic cancer according to the method defined in any one of claims 1-79; and
(b) providing the individual with pancreatic cancer therapy.

88. The method according to claim 87 wherein the pancreatic cancer therapy is selected from the group consisting of surgery (e.g., resection), chemotherapy, immunotherapy, chemoimmunotherapy and thermochemotherapy.

89. A method or use for determining the presence of pancreatic cancer in an individual substantially as described herein.

90. An array or kit for determining the presence of pancreatic cancer in an individual substantially as described herein.

The application's sequence listing, which the Patent Office published only in electronic form, follows.

SEQUENCE LISTING (339 sequences)

SEQ ID NO: 1 - protein, 261 aa, Artificial Sequence
  IL-1alpha (1) scFv antibody
  VARIANT 193: Any amino acid
  VARIANT 239: Any amino acid
  VARIANT 253..255: Any amino acids
EVQLLESGGGLVQPGGSLRLSCAASGFTFSSYAMHWVRQAPGKGLEWVSGVSWNGSRTHYADSVKGRFTISRDNSKNTLYLQMNSLRAEDTAVYYCARSSGYYSWAFDIWGQGTLVTVSSGGGGSGGGGSGGGGSQSVLTQPPSASGTPGQRVTISCSGSSSNIGRNTVNWYQQLPGTAPKLLIYGNSNRPSXVPDRFSGSKSGTSASLAISGLRSEDEADYYCAAWDDSLNGWAFGGXTKLTVLGEQKLISXXXLSGSAA

SEQ ID NO: 2 - protein, 264 aa, Artificial Sequence
  IL-1alpha (2) scFv antibody
  VARIANT 222: Any amino acid
  VARIANT 242: Any amino acid
EVQLLESGGGLVQPGGSLRLSCAASGFTFSSYSMNWVRQAPGKGLEWVALISYDGSQKYYADSMKGRFTISRDNSKNTLYLQMNSLRAEDTAVYYCAKGHTSGTKAYYFDSWGQGTLVTVSSGGGGSGGGGSGGGGSQSVLTQPPSASGTPGQRVTISCTGTSSNIGAGYSVHWYQQLPGTAPKLLIYGNSNRPSGVPDRFSGSKSGTSASLAISGLRSEDXADYYCQSYDSSLSGWVFGGXTKLTVLGEQKLISEEDLSGSAA

SEQ ID NO: 3 - protein, 260 aa, Artificial Sequence
  IL-2 (1) scFv antibody
  VARIANT 238: Any amino acid
  VARIANT 243: Any amino acid
  VARIANT 252..253: Any amino acids
EVQLLESGGGLVQPGGSLRLSCAASGFTFGDYAMSWVRQAPGKGLEWVSSISSRGSYIYFADSVKGRFTISRDNSKNTLYLQMNSLRAEDTAVYYCAKKKTGYYGLDAWGQGTLVTVSSGGGGSGGGGSGGGGSQSVLTQPPSASGTPGQRVTISCTGSSSNIGAGYDVHWYQQLPGTAPKLLIYGNSNRPSGVPDRFSGSKSGTSASLAISGLRSEDEADYYCSSYAGSNNLVFGGXTKLTXLGEQKLISXXDLSGSAA

SEQ ID NO: 4 - protein, 260 aa, Artificial Sequence
  IL-2 (2) scFv antibody
  VARIANT 3..4: Any amino acids
  VARIANT 238..239: Any amino acids
  VARIANT 253..254: Any amino acids
EVXXLESGGGLVQPGGSLRLSCAASGFTFGDYAMSWVRQAPGKGLEWVSSISSRGSYIYFADSVKGRFTISRDNSKNTLYLQMNSLRAEDTAVYYCAKKKTGYYGLDAWGQGTLVTVSSGGGGSGGGGSGGGGSQSVLTQPPSASGTPGQRVTISCTGSSSNIGAGYDVHWYQQLPGTAPKLLIYGNSNRPSGVPDRFSGSKSGTSASLAISGLRSEDEADYYCSSYAGSNNLVFGGXXKLTVLGEQKLISEXXLSGSAA

SEQ ID NO: 5 - protein, 191 aa, Artificial Sequence
  IL-2 (3) scFv antibody
  VARIANT 162: Any amino acid
EVQLLESGGGLVQPGGSLRLSCAASGFTFGDYAMSWVRQAPGKGLEWVSSISSRGSYIYFADSVKGRFTISRDNSKNTLYLQMNSLRAEDTAVYYCAKKKTGYYGLDAWGQGTLVTVSSGGGGSGGGGSGGGGSQSVLTQPPSASGTPGQRVTISCTGSSSXIGAGYDVHWYQQLPGTAPKLLIYGNSNRP

SEQ ID NO: 6 - protein, 262 aa, Artificial Sequence
  IL-3 (1) scFv antibody
  VARIANT 220: Any amino acid
  VARIANT 240..241: Any amino acids
  VARIANT 254..256: Any amino acids
  VARIANT 260: Any amino acid
EVQLLESGGGLVQPGGSLRLSCAASGFTFGRYTMHWVRQAPGKGLEWVSSISSSSSYIYYADSVKGRFTISRDNSKNTLYLQMNSLRAEDTAVYYCARHFFESSGGYFDYWGQGTLVTVSSGGGGSGGGGSGGGGSQSVLTQPPSASGTPGQRVTISCSGSSSNIGSNTVNWYQQLPGTAPKLLIYRNNQRPSGVPDRFSGSKSGTSASLAISGLRSEDXADYYCAAWDDSLNGWVFGGXXKLTVLGEQKLISXXXLSGXAA

SEQ ID NO: 7 - protein, 257 aa, Artificial Sequence
  IL-3 (2) scFv antibody
  VARIANT 242: Any amino acid
  VARIANT 250: Any amino acid
EVQLLESGGGLVQPGGSLRLSCAASGFTFSSYAMSWVRQAPGKGLEWVSAISGSGGSTYYADSVKGRFTISRDNSKNTLYLQMNSLRAEDTAVYYCARGGARYDYWGQGTLVTVSSGGGGSGGGGSGGGGSQSVLTQPPSASGTPGQRVTISCSGSSSNIGSNTVNWYQQLPGTAPKLLIYDNNKRPSGVPDRFSGSKSGTSASLAISGLRSEDEADYYCQSYDNILRGVVFGGGTKLTVLXEQKLISEXDLSGSAA

SEQ ID NO: 8 - protein, 258 aa, Artificial Sequence
  IL-3 (3) scFv antibody
  VARIANT 3..5: Any amino acids
  VARIANT 204: Any amino acid
  VARIANT 236: Any amino acid
  VARIANT 250..251: Any amino acids
EVXXXESGGGLVQPGGSLRLSCAASGFTFSSYAMSWVRQAPGKGLEWVSAISGRGEYTYYAGSVKGRFTISRDNSKNTLYLQMNSLRAEDTAVYYCATGATRFGYWGQGTLVTVSSGGGGSGGGGSGGGGSQSVLTQPPSASGTPGQRVTISCTGSSSNIGAGYGVQWYQQLPGTAPKLLIYRNNQRPSGVPDRFSGSKSGTSXSLAISGLRSEDEADYYCQSYDSSLSYSVFGGXTKLTVLGEQKLISXXDLSGSAA

SEQ ID NO: 9 - protein, 264 aa, Artificial Sequence
  IL-4 (1) scFv antibody
  VARIANT 242: Any amino acid
  VARIANT 256: Any amino acid
  VARIANT 258: Any amino acid
EVQLLESGGGLVQPGGSLRLSCAASGFTFSNAWMSWVRQAPGKGLEWVSSLHGGGDTFYTDSVKGRFTISRDNSKNTLYLQMNSLRAEDTAVYYCASLYGSGSYYYYYYGMDVWGQGTLVTVSSGGGGSGGGGSGGGGSQSVLTQPPSASGTPGQRVTISCSGNNSNTGNNAVNWYQQLPGTAPKLLIYDNNKRPSGVPDRFSGSKSGTSASLAISGLRSEDEADYYCCSYAGSYIWVFGGXTKLTVLGEQKLISXEXLSGSAA

SEQ ID NO: 10 - protein, 266 aa, Artificial Sequence
  IL-4 (2) scFv antibody
  VARIANT 244: Any amino acid
  VARIANT 248: Any amino acid
  VARIANT 251: Any amino acid
  VARIANT 258..259: Any amino acids
EVQLLESGGGLVQPGGSLRLSCAASGFTFSDYGMHWVRQAPGKGLEWVSGISWNGGKTHYVDSVKGQFTISRDNSKNTLYLQMNSLRAEDTAVYYCARDRGYCSNGVCYTILDYWGQGTLVTVSSGGGGSGGGGSGGGGSQSVLTQPPSASGTPGQRVTISCSGSSSNIGSNTINWYQQLPGTAPKLLIYGNSNRPSGVPDRFSGSKSGTSASLAISGLRSEDEADYYCQSYDSSLSGWVFGGXTKLXVLXEQKLISXXDLSGSAA

SEQ ID NO: 11 - protein, 187 aa, Artificial Sequence
  IL-5 (1) scFv antibody
  VARIANT 159: Any amino acid
EVQLLESGGGLVQPGGSLRLSCAASGFTFSSYAMSWVRQAPGKGLEWVSSISSRSNYIYYSDSVKGRFTISRDNSKNTLYLQMNSLRAEDTAVYYCARNFRFFDKWGQGTLVTVSSGGGGSGGGGSGGGGSQSVLTQPPSASGTPGQRVTISCSGGSSXIGANPVSWYQQLPGTAPKLLIYGNSNRP

SEQ ID NO: 12 - protein, 257 aa, Artificial Sequence
  IL-5 (2) scFv antibody
  VARIANT 235: Any amino acid
  VARIANT 242: Any amino acid
  VARIANT 250..251: Any amino acids
EVQLLESGGGLVQPGGSLRLSCAASGFTFSSYAMSWVRQAPGKGLEWVSSISSRSNYIYYSDSVKGRFTISRDNSKNTLYLQMNSLRAEDTAVYYCARNFRFFDKWGQGTLVTVSSGGGGSGGGGSGGGGSQSVLTQPPSASGTPGQRVTISCSGGSSNIGANPVSWYQQLPGTAPKLLIYGNSNRPSGVPDRFSGSKSGTSASLAISGLRSEDEADYYCQSYDSSLSGSVFGGXTKLTVLXEQKLISEXXLSGSAA

SEQ ID NO: 13 - protein, 257 aa, Artificial Sequence
  IL-5 (3) scFv antibody
  VARIANT 235: Any amino acid
  VARIANT 249: Any amino acid
EVQLLESGGGLVQPGGSLRLSCAASGFTFSSYAMSWVRQAPGKGLEWVSSISSRSNYIYYSDSVKGRFTISRDNSKNTLYLQMNSLRAEDTAVYYCARNFRFFDKWGQGTLVTVSSGGGGSGGGGSGGGGSQSVLTQPPSASGTPGQRVTISCSGGSSNIGANPVSWYQQLPGTAPKLLIYGNSNRPSGVPDRFSGSKSGTSASLAISGLRSEDEADYYCQSYDSSLSGSVFGGXTKLTVLGEQKLISXEDLSGSAA

SEQ ID NO: 14 - protein, 297 aa, Artificial Sequence
  IL-6 (1) scFv antibody
  VARIANT 203: Any amino acid
  VARIANT 208: Any amino acid
  VARIANT 213: Any amino acid
  VARIANT 218: Any amino acid
  VARIANT 220: Any amino acid
  VARIANT 226..227: Any amino acids
  VARIANT 234..236: Any amino acids
  VARIANT 240: Any amino acid
  VARIANT 242: Any amino acid
  VARIANT 247..248: Any amino acids
  VARIANT 254..256: Any amino acids
  VARIANT 261..263: Any amino acids
  VARIANT 268..269: Any amino acids
  VARIANT 272..273: Any amino acids
  VARIANT 275..278: Any amino acids
  VARIANT 280..282: Any amino acids
  VARIANT 284: Any amino acid
  VARIANT 289: Any amino acid
  VARIANT 291: Any amino acid
  VARIANT 293: Any amino acid
  VARIANT 295..297: Any amino acids
EVQLLESGGGLVQPGGSLRLSCAASGFTFSSYGMHWVRQAPGKGLEWVSGINWNGGSTGYADSVKGRFTISRDNSKNTLYLQMNSLRAEDTAVYYCARNRGSSLYYGMDVWGQGTLVTVSSGGGGSGGGGSGGGGSQSVLTQPPSASGTPGQRVTISCAGSSSNIGSKSVHWYQQLPGTAPKLLIYRNNRRPSGVPDRFSGSXSGTSXSLAIXGLRSXDXADYYCXXWDDRVNXXXFGGXTXLTVLXXQKLISXXXLSGSXXXPSSSXXLIXXGXXXXLXXXLXFTGRXFXTXLXXX

SEQ ID NO: 15 - protein, 260 aa, Artificial Sequence
  IL-6 (2) scFv antibody
  VARIANT 238: Any amino acid
  VARIANT 248: Any amino acid
  VARIANT 254: Any amino acid
EVQLLESGGGLVQPGGSLRLSCAASGFTFSNYGMHWVRQAPGKGLEWVSSITSSGDGTYFADSVKGRFTISRDNSKNTLYLQMNSLRAEDTAVYYCARAGGIAAAYAFDIWGQGTLVTVSSGGGGSGGGGSGGGGSQSVLTQPPSASGTPGQRVTISCSGSSSNVGSNYVYWYQQLPGTAPKLLIYDNNKRPSGVPDRFSGSKSGTSASLAISGLRSEDEADYYCQSYDSSRWVFGGXTKLTVLGEQXLISEEXLSGSAA

SEQ ID NO: 16 - protein, 269 aa, Artificial Sequence
  IL-7 (1) scFv antibody
  VARIANT 226..227: Any amino acids
  VARIANT 247..248: Any amino acids
  VARIANT 251: Any amino acid
  VARIANT 262..263: Any amino acids
EVQLLESGGGLVQPGGSLRLSCAASGFTFSSYGMHWVRQAPGKGLEWVSGITWNSGSIGYVDSVKGRFTISRDNSKNTLYLQMNSLRAEDTAVYYCARGPSVAARRIGRHWYNWFDPWGQGTLVTVSSGGGGSGGGGSGGGGSQSVLTQPPSASGTPGQRVTISCSGSSSNIGSNSVYWYQQLPGTAPKLLIYDNNKRPSGVPDRFSGSKSGTSASLAISGLRSEXXADYYCQSYDSSLSGSVFGGXXKLXVLGEQKLISEXXLSGSAA

SEQ ID NO: 17 - protein, 256 aa, Artificial Sequence
  IL-7 (2) scFv antibody
  VARIANT 226..227: Any amino acid
  VARIANT 247: Any amino acid
EVQLLESGGGLVQPGGSLRLSCAASGFTFSDYNIHWVRQPPGKGLEWVSGVSWNGSRTHYADSVKGQFTISRDNSKNTLYLQMNSLRAEDTAVYYCARDPAMVRGVVLPNYYGLDVWGQGTLVTVSSGGGGSGGGGSGGGGSQSVLTQPPSASGTPGQRVTISCTGSSSNIGAGYDVHWYQQLPGTAPKLLIYGHSNRPSGVPDRFSGSKSGTSASLAISGLRSEXXADYYCQSYDSSLSYPVFGGXTKLTVLGEQ

SEQ ID NO: 18 - protein, 259 aa, Artificial Sequence
  IL-8 (1) scFv antibody
  VARIANT 191: Any amino acid
  VARIANT 237: Any amino acid
  VARIANT 244: Any amino acid
  VARIANT 252..253: Any amino acids
EVQLLESGGGLVQPGGSLRLSCAASGFTFDDYGMSWVRQAPGKGLEWVSLISWDGGSTYYADSVKGRFTISRDNSKNTLYLQMNSLRAEDTAVYYCARDDLYGMDVWGQGTLVTVSSGGGGSGGGGSGGGGSQSVLTQPPSASGTPGQRVTISCTGSSSNIGAGYDVHWYQQLPGTAPKLLIYDNNKRPSXVPDRFSGSKSGTSASLAISGLRSEDEADYYCAAWDDSLSGWVFGGXTKLTVLXEQKLISEXXLSGSAA

SEQ ID NO: 19 - protein, 265 aa, Artificial Sequence
  IL-8 (2) scFv antibody
  VARIANT 243: Any amino acid
  VARIANT 250: Any amino acid
  VARIANT 257..259: Any amino acids
EVQLLESGGGLVQPGGSLRLSCAASGFTFSSYEMNWVRQAPGKGLEWVSSISSSSSYIFYADSMKGRFTISRDNSKNTLYLQMNSLRAEDTAVYYCARNESVDPLGGQYFQHWGQGTLVTVSSGGGGSGGGGSGGGGSQSVLTQPPSASGTPGQRVTISCTGSSSNIGAGYDVHWYQQLPGTAPKLLIYDNNKRPSGVPDRFSGSKSGTSASLAISGLRSEDEADYYCSAWDDNLDGPVFGGXTKLTVLXEQKLISXXXLSGSAA

SEQ ID NO: 20 - protein, 251 aa, Artificial Sequence
  IL-9 (1) scFv antibody
  VARIANT 229: Any amino acid
  VARIANT 236: Any amino acid
  VARIANT 244: Any amino acid
EVQLLESGGGLVQPGGSLRLSCAASGFTFSSYAMSWVRQAPGKGLEWVSSISSSSSYIYYADSVKGRFTISRDNSKNTLYLQMNSLRAEDTAVYYCTTFGHWGQGTLVTVSSGGGGSGGGGSGGGGSQSVLTQPPSASGTPGQRVTISCSGSGSNIGDNSVNWYQQLPGTAPKLLIYGNNNRPSGVPDRFSGSKSGTSASLAISGLRSEDEADYYCSSYTSSSVVFGGXTKLTVLXEQKLISEXDLSGSAA

SEQ ID NO: 21 - protein, 192 aa, Artificial Sequence
  IL-9 (2) scFv antibody
EVQLLESGGGLVQPGGSLRLSCAASGFTFSSYGMHWVRQAPGKGLEWVAVISYDGSNKYYADSVKGRFTISRDNSKNTLYLQMNSLRAEDTAVYYCAKSPGGSPYYFDYWGQGTLVTVSSGGGGSGGGGSGGGGSQSVLTQPPSASGTPGQRVTISCSGSVSNIGSNVVSWYQQLPGTAPKLLIYDNNKRPS

SEQ ID NO: 22 - protein, 261 aa, Artificial Sequence
  IL-9 (3) scFv antibody
  VARIANT 239: Any amino acid
  VARIANT 254: Any amino acid
EVQLLESGGGLVQPGGSLRLSCAASGFTFSSYGMHWVRQAPGKGLEWVAVISYDGSNKYYADSVKGRFTISRDNSKNTLYLQMNSLRAEDTAVYYCAKSPGGSPYYFDYWGQGTLVTVSSGGGGSGGGGSGGGGSQSVLTQPPSASGTPGQRVTISCSGSVSNIGSNVVSWYQQLPGTAPKLLIYDNNKRPSGVPDRFSGSKSGTSASLAISGLRSEDEADYYCQSYDSSLGGWVFGGXTKLTVLGEQKLISEXDLSGSAA

SEQ ID NO: 23 - protein, 261 aa, Artificial Sequence
  IL-10 (1) scFv antibody
  VARIANT 216: Any amino acid
  VARIANT 218: Any amino acid
  VARIANT 239: Any amino acid
  VARIANT 253..254: Any amino acids
EVQLLESGGGLVQPGGSLRLSCAASGFTFRSYVMSWVRQAPGKGLEWVSAISGSGGSTYYADSVKGRFTISRDNSKNTLYLQMNSLRAEDTAVYYCARGKGRWAFDIWGQGTLVTVSSGGGGSGGGGSGGGGSQSVLTQPPSASGTPGQRVTISCTGSSSNVGAGYDVHWYQQLPGTAPKLLIYRNNQRPSGVPDRFSGSKSGTSASLAISGLRSXDXADYYCAAWDDSLSAHVVFGGXTKLTVLGEQKLISXXDLSGSAA

SEQ ID NO: 24 - protein, 261 aa, Artificial Sequence
  IL-10 (2) scFv antibody
  VARIANT 239: Any amino acid
  VARIANT 254: Any amino acid
EVQLLESGGGLVQPGGSLRLSCAASGFTFRSYVMSWVRQAPGKGLEWVSAISGSGGSTYYADSVKGRFTISRDNSKNTLYLQMNSLRAEDTAVYYCARGKGRWAFDIWGQGTLVTVSSGGGGSGGGGSGGGGSQSVLTQPPSASGTPGQRVTISCTGSSSNVGAGYDVHWYQQLPGTAPKLLIYRNNQRPSGVPDRFSGSKSGTSASLAISGLRSEDEADYYCAAWDDSLSAHVVFGGXTKLTVLGEQKLISEXDLSGSAA

SEQ ID NO: 25 - protein, 260 aa, Artificial Sequence
  IL-10 (3) scFv antibody
  VARIANT 218: Any amino acid
  VARIANT 238: Any amino acid
  VARIANT 245: Any amino acid
  VARIANT 253..254: Any amino acids
EVQLLESGGGLVQPGGSLRLSCAASGFTFSSYAMSWVRQAPGKGLEWVSAISGSGGSTYYADSVKGRFTISRDNSKNTLYLQMNSLRAEDTAVYYCARGKGRWAFDIWGQGTLVTVSSGGGGSGGGGSGGGGSQSVLTQPPSASGTPGQRVTISCTGSSSNIGAGYGVHWYQQLPGTAPKLLIYGNSNRPSGVPDRFSGSKSGTSASLAISGLRSEDXADYYCAAWDDSLSGLVFGGXTKLTVLXEQKLISEXXLSGSAA

SEQ ID NO: 26 - protein, 262 aa, Artificial Sequence
  IL-11 (1) scFv antibody
  VARIANT 231: Any amino acid
  VARIANT 240: Any amino acid
  VARIANT 254: Any amino acid
  VARIANT 256: Any amino acid
EVQLLESGGGLVQPGGSLRLSCAASGFTFSNFGMHWVRQAPGKGLEWVAFIRYDGSNKYYADSVKGRFTISRDNSKNTLYLQMNSLRAEDTAVYYCARHYYYSETSGHPGGFDPWGQGTLVTVSSGGGGSGGGGSGGGGSQSVLTQPPSASGTPGQRVTISCSGSSSNIGSYPVNWYQQLPGTAPKLLIYGNSNRPSGVPDRFSGSKSGTSASLAISGLRSEDEADYYCQXWGTGVFGGXTKLTVLGEQKLISXEXLSGSAA

SEQ ID NO: 27 - protein, 267 aa, Artificial Sequence
  IL-11 (2) scFv antibody
  VARIANT 208: Any amino acid
  VARIANT 245: Any amino acid
  VARIANT 260..261: Any amino acids
EVQLLESGGGLVQPGGSLRLSCAASGFTFSSYGMHWVRQAPGKGLEWVAVISYDGSNKYYADSVKGRFTISRDNSKNTLYLQMNSLRAEDTAVYYCARHYYDVSYRGQQDAFDIWGQGTLVTVSSGGGGSGGGGSGGGGSQSVLTQPPSASGTPGQRVTISCTGSSSNLGSPYDVHWYQQLPGTAPKLLIYRNDQRASGVPDRFSGSXSGTSASLAISGLRSEDEADYYCAAWDDSLNAWVFGGXTKLTVLGEQKLISEXXLSGSAA

SEQ ID NO: 28 - protein, 263 aa, Artificial Sequence
  IL-11 (3) scFv antibody
  VARIANT 241: Any amino acid
EVQLLESGGGLVQPGGSLRLSCAASGFTFSDYYMSWIRQAPGKGLEWVAYISGISGYTNYADSVRGRFTISRDNSKNTLYLQMNSLRAEDTAVYYCAKSKDWVNGGEMDVWGQGTLVTVSSGGGGSGGGGSGGGGSQSVLTQPPSASGTPGQRVTISCTGSSSNIGAGYVVHWYQQLPGTAPKLLIYSNNQRPSGVPDRFSGSKSGTSASLAISGLRSEDEADYYCAAWDDSLRGWVFGGXTKLTVLGEQKLISEEDLSGSAA

SEQ ID NO: 29 - protein, 256 aa, Artificial Sequence
  IL-12 (1) scFv antibody
  VARIANT 234: Any amino acid
  VARIANT 249: Any amino acid
EVQLLESGGGLVQPGGSLRLSCAASGFTFSSYSMNWVRQAPGKGLEWVSAIGTGGGTYYADSVKGRFTISRDNSKNTLYLQMNSLRAEDTAVYYCARAFRAFDIWGQGTLVTVSSGGGGSGGGGSGGGGSQSVLTQPPSASGTPGQRVTISCSGSRSNIGNNFVSWYQQLPGTAPKLLIYGNSNRPSGVPDRFSGSKSGTSASLAISGLRSEDEADYYCAAWDDSLSGPVFGGXTKLTVLGEQKLISEXDLSGSAA

SEQ ID NO: 30 - protein, 262 aa, Artificial Sequence
  IL-12 (2) scFv antibody
  VARIANT 255..256: Any amino acids
EVQLLESGGGLVQPGGSLRLSCAASGFTFSDYYMSWVRQAPGKGLEWVSGVSWNGSRTHYADSVKGQFTISRDNSKNTLYLQMNSLRAEDTAVYYCARGSRSSPDAFDIWGQGTLVTVSSGGGGSGGGGSGGGGSQSVLTQPPSASGTPGQRVTISCTGSSSNIGAGYDVHWYQQLPGTAPKLLIYGNSNRPSGVPDRFSGSKSGTSASLAISGLRSEDEADYYCAAWDDRVNGRVFGGGTKLTVLGEQKLISEXXLSGSAA

SEQ ID NO: 31 - protein, 231 aa, Artificial Sequence
  IL-13 (1) scFv antibody
EVQLLESGGGLVQPGGSLRLSCAASGFTFSSYSMNWVRQAPGKGLEWVSSISSGSSYIYYADSVKGRFTISRDNSKNTLYLQMNSLRAEDTAVYYCARSQGWWTYYYGMDVWGQGTLVTVSSGGGGSGGGGSGGGGSQSVLTQPPSASGTPGQRVTISCSGSSSNIGSNTVNWYQQLPGTAPKLLIYSNNQRPSGVPDRFSGSKSGTSASLAISGLRSEDEADYYCETWGQ

SEQ ID NO: 32 - protein, 317 aa, Artificial Sequence
  IL-13 (2) scFv antibody
  VARIANT 221: Any amino acid
  VARIANT 229: Any amino acid
  VARIANT 239: Any amino acid
  VARIANT 255: Any amino acid
  VARIANT 261: Any amino acid
  VARIANT 270: Any amino acid
  VARIANT 272: Any amino acid
  VARIANT 275..276: Any amino acids
  VARIANT 280: Any amino acid
  VARIANT 285..286: Any amino acids
  VARIANT 289: Any amino acid
  VARIANT 296..297: Any amino acids
  VARIANT 301..303: Any amino acids
  VARIANT 310..312: Any amino acids
  VARIANT 314..317: Any amino acids
EVQLLESGGGLVQPGGSLRLSCAASGFTFSSYSMNWVRQAPGKGLEWVSSISSGSSYIYYADSVKGRFTISRDNSKNTLYLQMNSLRAEDTAVYYCARSQGWWTYYYGMDVWGQGTLVTVSSGGGGSGGGGSGGGGSQSVLTQPPSASGTPGQRVTISCSGSSSNIGSNTVNWYQQLPGTAPKLLIYSNNQRPSGVPDRFSGSKSGTSASLAISGLRSEDXADYYCETXDSNTQIFGGXTKLTVLGEQKLISEEXLSGSAXAHHHHHHSXRXPIXXIVSXITIHXXSFXNVVTGKXXALPXXXALQHIPXXXAXXXX

SEQ ID NO: 33 - protein, 261 aa, Artificial Sequence
  IL-13 (3) scFv antibody
  VARIANT 239: Any amino acid
  VARIANT 254: Any amino acid
EVQLLESGGGLVQPGGSLRLSCAASGFTFSSYSMNWVRQAPGKGLEWVSSISSGSSYIYYADSVKGRFTISRDNSKNTLYLQMNSLRAEDTAVYYCARSQGWWTYYYGMDVWGQGTLVTVSSGGGGSGGGGSGGGGSQSVLTQPPSASGTPGQRVTISCSGSSSNIGSNTVNWYQQLPGTAPKLLIYSNNQRPSGVPDRFSGSKSGTSASLAISGLRSEDEADYYCETWDSNTQIFGGXTKLTVLGEQKLISEXDLSGSAA

SEQ ID NO: 34 - protein, 262 aa, Artificial Sequence
  VEGF (1) scFv antibody
  VARIANT 203: Any amino acid
  VARIANT 240: Any amino acid
  VARIANT 255: Any amino acid
EVQLLESGGGLVQPGGSLRLSCAASGFTFSSNEMSWIRQAPGKGLEWVSSISGSGGFTYYADSVKGRYTISRDNSKNTLYLQMNSLRAEDTAVYYCARETTVRGNAFDIWGQGTLVTVSSGGGGSGGGGSGGGGSQSVLTQPPSASGTPGQRVTISCTGGSSNIGAGYDVHWYQQLPGTAPKLLIYRNNQRPSGVPDRFSGSXSGTSASLAISGLRSEDEADYYCAAWDDSLSVPMFGGXTKLTVLGEQKLISEXDLSGSAA

SEQ ID NO: 35 - protein, 265 aa, Artificial Sequence
  VEGF (2) scFv antibody
  VARIANT 197: Any amino acid
  VARIANT 206: Any amino acid
  VARIANT 222: Any amino acid
  VARIANT 243: Any amino acid
  VARIANT 252: Any amino acid
  VARIANT 258..259: Any amino acids
EVQLLESGGGLVQPGGSLRLSCAASGFTFSSYSMNWVRQAPGKGLEWVSGINWNGGSTGYADSVKGRFTISRDNSKNTLYLQMNSLRAEDTAVYYCASSVGGWYEGDNWFDPWGQGTLVTVSSGGGGSGGGGSGGGGSQSVLTQPPSASGTPGQRVTISCTGSSSNIGAGYDVHWYQQLPGTAPKLLIYGNSNRPSXVPDRFSGSXSGTSASLAISGLRSEXEADYYCQSYDGSLSGSVFGGXTKLTVLGEXKLISEXXLSGSAA

SEQ ID NO: 36 - protein, 260 aa, Artificial Sequence
  TGF-beta1 (1) scFv antibody
  VARIANT 238: Any amino acid
  VARIANT 242: Any amino acid
EVQLLESGGGLVQPGGSLRLSCAASGFTFSTYAMSWVRQAPGKGLEWVAVVSIDGGTTYYGDPVKGRFTISRDNSKNTLYLQMNSLRAEDTAVYYCTRGPTLTYYFDYWGQGTLVTVSSGGGGSGGGGSGGGGSQSVLTQPPSASGTPGQRVTISCSGSSSNIGSNTVNWYQQLPGTAPKLLIYSNNQRPSGVPDRFSGSKSGTSASLAISGLRSEDEADYYCQSYDSSLSGWVFGGXTKLXVLGEQKLISEEDLSGSAA

SEQ ID NO: 37 - protein, 259 aa, Artificial Sequence
  TGF-beta1 (2) scFv antibody
  VARIANT 241: Any amino acid
  VARIANT 252: Any amino acid
EVQLLESGGGLVQPGGSLRLSCAASGFTFGDYAMSWFRQAPGKGLEWVSGVSWNGSRTHYADSVKGRFTISRDNSKNTLYLQMNSLRAEDTAVYYCARDGNRPLDYWGQGTLVTVSSGGGGSGGGGSGGGGSQSVLTQPPSASGTPGQRVTISCTGSSSNIGAGYDVHWYQQLPGTAPKLLIYGNSNRPSGVPDRFSGSKSGTSASLAISGLRSEDEADYYCAAWDDRLNGWVFGGGTKLXVLGEQKLISEXDLSGSAA

SEQ ID NO: 38 - protein, 267 aa, Artificial Sequence
  TGF-beta1 (3) scFv antibody
  VARIANT 225: Any amino acid
  VARIANT 245: Any amino acid
  VARIANT 259..261: Any amino acids
EVQLLESGGGLVQPGGSLRLSCAASGFTFSDYYIGWIRQAPGKGLEWVSGINWNGGSTGYADSVKGRFTISRDNSKNTLYLQMNSLRAEDTAVYYCARRSTPSSSWALPDFFDYWGQGTLVTVSSGGGGSGGGGSGGGGSQSVLTQPPSASGTPGQRVTISCTGSSSNIGANYDVHWYQQLPGTAPKLLIYSNNQRPSGVPDRFSGSKSGTSASLAISGLRSEDXADYYCQSYDSSLSGWVFGGXTKLTVLGEQKLISXXXLSGSAA

SEQ ID NO: 39 - protein, 259 aa, Artificial Sequence
  TNF-alpha (1) scFv antibody
  VARIANT 191: Any amino acid
  VARIANT 200: Any amino acid
  VARIANT 237: Any amino acid
  VARIANT 244: Any amino acid
  VARIANT 251..252: Any amino acids
EVQLLESGGGLVQPGGSLRLSCAASGFTFDDYGMSWVRQAPGKGLEWVAVISYDGSNKYYADSVKGRFTISRDNSKNTLYLQMNSLRAEDTAVYYCTRHLGSAMGYWGQGTLVTVSSGGGGSGGGGSGGGGSQSVLTQPPSASGTPGQRVTISCTGSSSNIGAGYDVHWYQQLPGTAPKLLIYGNSNRPSXVPDRFSGSXSGTSASLAISGLRSEDEADYYCQSYDSSLSGWVFGGXTKLTVLXEQKLISXXDLSGSAA

SEQ ID NO: 40 - protein, 261 aa, Artificial Sequence
  TNF-alpha (2) scFv antibody
  VARIANT 239: Any amino acid
  VARIANT 241: Any amino acid
  VARIANT 246: Any amino acid
  VARIANT 254..255: Any amino acids
EVQLLESGGGLVQPGGSLRLSCAASGFTFSSYGMHWVRQAPGKGLEWVSAISGSGGSTYYADSVKGRFTISRDNSKNTLYLQMNSLRAEDTAVYYCARGGWGPRSAFDIWGQGTLVTVSSGGGGSGGGGSGGGGSQSVLTQPPSASGTPGQRVTISCSGSSSNIGSNTVTWYQQLPGTAPKLLIYGNTNRLSGVPDRFSGSKSGTSASLAISGLRSEDEADYYCEAWDDKLFGPVFGGXTXLTVLXEQKLISEXXLSGSAA

SEQ ID NO: 41 - protein, 261 aa, Artificial Sequence
  TNF-alpha (3) scFv antibody
  VARIANT 240: Any amino acid
  VARIANT 246: Any amino acid
  VARIANT 248: Any amino acid
  VARIANT 253..255: Any amino acids
EVQLLESGGGLVQPGGSLRLSCAASGFTFSSYWMSWVRQAPGKGLEWVSGVNWNGSRTHYADSVKGRFTISRDNSKNTLYLQMNSLRAEDTAVYYCASIRANYYYGMDVWGQGTLVTVSSGGGGSGGGGSGGGGSQSVLTQPPSASGTPGQRVTISCSGGSSNIGSHPVNWYQQLPGTAPKLLIYGNSNRPSGVPDRFSGSKSGTSASLAISGLRSEDEADYYCAAWDASLSGWVFGGGXKLTVLXEXKLISXXXLSGSAA

SEQ ID NO: 42 - protein, 261 aa, Artificial Sequence
  GM-CSF (1) scFv antibody
  VARIANT 197: Any amino acid
  VARIANT 239: Any amino acid
  VARIANT 254..255: Any amino acids
EVQLLESGGGLVQPGGSLRLSCAASGFTFSSYGMHWVRQAPGKGLEWVAVISYDGSNKYYADSVKGRFTISRDNSKNTLYLQMNSLRAEDTAVYYCARVGGMSAPVDYWGQGTLVTVSSGGGGSGGGGSGGGGSQSVLTQPPSASGTPGQRVTISCSGSSSNIGSNTVNWYQQLPGTAPKLLIYDNNKRPSGVPDRXSGSKSGTSASLAISGLRSEDEADYYCAAWDDSLIGLVVFGGXTKLTVLGEQKLISEXXLSGSAA

SEQ ID NO: 43 - protein, 260 aa, Artificial Sequence
  GM-CSF (2) scFv antibody
  VARIANT 193: Any amino acid
  VARIANT 238: Any amino acid
  VARIANT 242: Any amino acid
  VARIANT 252: Any amino acid
EVQLLESGGGLVQPGGSLRLSCAASGFTFSSYAMSWVRQAPGKGLEWVAVISYDGSNEDSADSVKGRFTISRDNSKNTLYLQMNSLRAEDTAVYYCARGPSLRGVSDYWGQGTLVTVSSGGGGSGGGGSGGGGSQSVLTQPPSASGTPGQRVTISCTGSSSNIGAGYDVHWYQQLPGTAPKLLIYNDNQRPSXVPDRFSGSKSGTSASLAISGLRSEDEADYYCQTWGTGINVIFGGXTKLXVLGEQKLISXEDLSGSAA

SEQ ID NO: 44 - protein, 260 aa, Artificial Sequence
  GM-CSF (3) scFv antibody
  VARIANT 219: Any amino acid
  VARIANT 238: Any amino acid
  VARIANT 247: Any amino acid
  VARIANT 253..254: Any amino acids
EVQLLESGGGLVQPGGSLRLSCAASGFTFSSYAMSWVRQAPGKGLEWVAVISYDGSNEDSADSVKGRFTISRDNSKNTLYLQMNSLRAEDTAVYYCARGPSLRGVSDYWGQGTLVTVSSGGGGSGGGGSGGGGSQSVLTQPPSASGTPGQRVTISCTGSSSNIGAGYDVHWYQQLPGTAPKLLIYNDNQRPSGVPDRFSGSKSGTSASLAISGLRSEDXADYYCQTWGTGINVIFGGXTKLTVLGEXKLISEXXLSGSAA

SEQ ID NO: 45 - protein, 261 aa, Artificial Sequence
  TNF-beta (1) scFv antibody
  VARIANT 194: Any amino acid
  VARIANT 203: Any amino acid
  VARIANT 228: Any amino acid
  VARIANT 239: Any amino acid
  VARIANT 253..254: Any amino acids
EVQLLESGGGLVQPGGSLRLSCAASGFTFSSFAMHWVRQAPGKGLEWVSAISGSGGSTYYADSVKGRFTISRDNSKNTLYLQMNSLRAEDTAVYYCASRSTLYYYYGMDVWGQGTLVTVSSGGGGSGGGGSGGGGSQSVLTQPPSASGTPGQRVTISCSGSTSNIGNSHVYWYQQLPGTAPKLLIYGNSNRPSXVPDRFSGSXSGTSASLAISGLRSEDEADYYCSSXAGSNNLVFGGXTKLTVLGEQKLISXXDLSGSAA

SEQ ID NO: 46 - protein, 258 aa, Artificial Sequence
  TNF-beta (2) scFv antibody
  VARIANT 236: Any amino acid
  VARIANT 243: Any amino acid
  VARIANT 250..252: Any amino acids
EVQLLESGGGLVQPGGSLRLSCAASGFTFSSYAMSWVRQAPGKGLEWVSAISGSGGSTYYADSVKGRFTISRDNSKNTLYLQMNSLRAEDTAVYYCARSPYYGMDVWGQGTLVTVSSGGGGSGGGGSGGGGSQSVLTQPPSASGTPGQRVTISCTGSSSNIGAGYDVHWYQQLPGTAPKLLIYRNDQRPSGVPDRFSGSKSGTSASLAISGLRSEDEADYYCSSYGGRDNVVFGGXTKLTVLXEQKLISXXXLSGSAA

SEQ ID NO: 47 - protein, 262 aa, Artificial Sequence
  IL-1ra (1) scFv antibody
  VARIANT 240: Any amino acid
  VARIANT 244: Any amino acid
  VARIANT 247: Any amino acid
  VARIANT 254: Any amino acid
EVQLLESGGGLVQPGGSLRLSCAASGFTFDTHWMSWVRQAPGKGLEWVSAISGSGGSTYYADSVKGRFTISRDNSKNTLYLQMNSLRAEDTAVYYCARHDYGDYRAFDIWGQGTLVTVSSGGGGSGGGGSGGGGSQSVLTQPPSASGTPGQRVTISCTGSSSNIGAGYVVHWYQQLPGTAPKLLIYGNNNRPSGVPDRFSGSKSGTSASLAISGLRSEDEADYYCQSYDSSLSGVVFGGXTKLXVLXEQKLISXEDLSGSAA

SEQ ID NO: 48 - protein, 259 aa, Artificial Sequence
  IL-1ra (2) scFv antibody
  VARIANT 217: Any amino acid
  VARIANT 227: Any amino acid
  VARIANT 237: Any amino acid
  VARIANT 251..254: Any amino acids
EVQLLESGGGLVQPGGSLRLSCAASGFTFSKYAMTWVRQAPGKGLEWVSAISGSGGNTYYADSVKGRFTISRDNSKNTLYLQMNSLRAEDTAVYYCARLVRGLYYGMDVWGQGTLVTVSSGGGGSGGGGSGGGGSQSVLTQPPSASGTPGQRVTISCSGSSSNIGNNAVNWYQQLPGTAPKLLIYGNSNRPSGVPDRFSGSKSGTSASLAISGLRSXDEADYYCQTXGTGPVVFGGXTKLTVLGEQKLISXXXXSGSAA

SEQ ID NO: 49 - protein, 263 aa, Artificial Sequence
  IL-1ra (3) scFv antibody
  VARIANT 241..242: Any amino acids
  VARIANT 245: Any amino acid
  VARIANT 248: Any amino acid
EVQLLESGGGLVQPGGSLRLSCAVSGFTFSSYSMNWVRQAPGKGLEWVAGIGGRGATTYYVDSVKGRFTISRDNSKNTLYLQMNSLRAEDTAVYYCARLRVVPAARFDYWGQGTLVTVSSGGGGSGGGGSGGGGSQSVLTQPPSASGTPGQRVTISCSGSSSNIGSNTVNWYQQLPGTAPKLLIYGNSNRPSGVPDRFSGSKSGTSASLAISGLRSEDEADYYCQSYDSSLSGPPWVFGGXXKLXVLXEQKLISEEDLSGSAA

SEQ ID NO: 50 - protein, 263 aa, Artificial Sequence
  IL-16 (1) scFv antibody
  VARIANT 241: Any amino acid
  VARIANT 256: Any amino acid
EVQLLESGGGLVQPGGSLRLSCAASGFTFSNHAMSWVRQAPGKGLEWVSGVSWNGSRTHYADSVKGRFTISRDNSKNTLYLQMNSLRAEDTAVYYCARAALVQGVKHAFEIWGQGTLVTVSSGGGGSGGGGSGGGGSQSVLTQPPSASGTPGQRVTISCSGSSSNIGSNTVNWYQQLPGTALKLLIYRNNQRPSGVPDRFSGSKSGTSASLAISGLRSEDEADYYCASWDDRLSGLVFGGXTKLTVLGEQKLISEXDLSGSAA

SEQ ID NO: 51 - protein, 263 aa, Artificial Sequence
  IL-16 (2) scFv antibody
  VARIANT 204: Any amino acid
  VARIANT 220: Any amino acid
  VARIANT 241: Any amino acid
  VARIANT 248: Any amino acid
EVQLLESGGGLVQPGGSLRLSCAASGFTFSNHAMSWVRQAPGKGLEWVSGVSWNGSRTHYADSVKGRFTISRDNSKNTLYLQMNSLRAEDTAVYYCARAALVQGVKHAFEIWGQGTLVTVSSGGGGSGGGGSGGGGSQSVLTQPPSASGTPGQRVTISCSGSSSNIGSNTVNWYQQLPGTALKLLIYRNNQRPSGVPDRFSGSXSGTSASLAISGLRSEXEADYYCASWDDRLSGLVFGGXTKLTVLXEQKLISEEDLSGSAA

SEQ ID NO: 52 - protein, 259 aa, Artificial Sequence
  IL-18 (1) scFv antibody
  VARIANT 201: Any amino acid
  VARIANT 226: Any amino acid
  VARIANT 237: Any amino acid
  VARIANT 251..253: Any amino acids
EVQLLESGGGLVQPGGSLRLSCAASGFTFSSYGMHWVRQAPGKGLEWVSGINWNGGSTGYADSVKGRFTISRDNSKNTLYLQMNSLRAEDTAVYYCARDLRGGRFDPWGQGTLVTVSSGGGGSGGGGSGGGGSQSVLTQPPSASGTPGQRVTISCTGSSSNIGAGYVVHWYQQLPGTAPKLLIYRNNQRPSGVPDRFSGSXSGTSASLAISGLRSEDEADYYCSSXAGSKNLIFGGXTKLTVLGEQKLISXXXLSGSAA

SEQ ID NO: 53 - protein, 262 aa, Artificial Sequence
  IL-18 (2) scFv antibody
  VARIANT 226: Any amino acid
  VARIANT 240..241: Any amino acids
  VARIANT 244: Any amino acid
  VARIANT 249: Any amino acid
  VARIANT 255: Any amino acid
EVQLLESGRGLVQPGGSLRLSCAASGFTFSSYGMHWVRQAPGKGLEWVSAIGTGGDTYYADSVMGRFTISRDNSKNTLYLQMNSLRAEDTAVYYCARSPRRGATAGTFDYWGQGTLVTVSSGGGGSGGGGSGGGGSQSVLTQPPSASGTPGQRVTISCSGSSSNIGSNIVNWYQQLPGTAPKLLIYRNNQRPSGVPDRFSGSKSGTSASLAISGLRSEDEADYYCXSYDNSLSGWVFGGXXKLXVLGEXKLISEXDLSGSAA

SEQ ID NO: 54 - protein, 261 aa, Artificial Sequence
  MCP-4 (1) scFv antibody
  VARIANT 239: Any amino acid
  VARIANT 254: Any amino acid
EVQLLESGGGLVQPGGSLRLSCAASGFTFSSYGMHWVRQAPGKGLEWVSGISWNGGKTHYVDSVKGQFTISRDNSKNTLYLQMNSLRAEDTAVYYCARGGYSSGWAFDYWGQGTLVTVSSGGGGSGGGGSGGGGSQSVLTQPPSASGTPGQRVTISCSGRSSNIESNTVNWYQQLPGTAPKLLIYGNSNRPSGVPDRFSGSKSGTSASLAISGLRSEDEADYYCAAWDDRLNAVVFGGXTKLTVLGEQKLISEXDLSGSAA

SEQ ID NO: 55 - protein, 261 aa, Artificial Sequence
  IFN-gamma (1) scFv antibody
  VARIANT 195: Any amino acid
  VARIANT 204: Any amino acid
  VARIANT 228: Any amino acid
  VARIANT 239: Any amino acid
  VARIANT 248: Any amino acid
  VARIANT 255: Any amino acid
EVQLLESGGGLVQPGGSLRLSCAASGFTFSSYGMHWVRQAPGKGLEWVSGVSWNGSRTHYADSVKGRFTISRDNSKNTLYLQMNSLRAEDTAVYYCARGRTGHGWKYYFDLWGQGTLVTVSSGGGGSGGGGSGGGGSQSVLTQPPSASGTPGQRVTISCSGSSSNIGNNAVNWYQQLPGTAPKLLIYGNSNRPSXVPDRFSGSXSGTSASLAISGLRSEDEADYYCQXWGTGLGVFGGXTKLTVLGEXKLISEEXLSGSAA

SEQ ID NO: 56 - protein, 189 aa, Artificial Sequence
  IFN-gamma (2) scFv antibody
EVQLLESGGGLVQPGGSLRLSCAASGFTFSRHGFHWVRQGPGKGLEWVSGVSWNGSRTHYADSVKGRFTISRDNSKNTLYLQMNSLRAEDTAVYYCARGNWYRAFDIWGQGTLVTVSSGGGGSGGGGSGGGGSQSVLTQPPSASGTPGQRVTISCSGGSSHIGRNFISWYQQLPGTAPKLLIYAGNSRP

SEQ ID NO: 57 - protein, 261 aa, Artificial Sequence
  IL-1beta (1) scFv antibody
  VARIANT 219: Any amino acid
  VARIANT 239: Any amino acid
  VARIANT 254..255: Any amino acids
EVQLLESGGGLVQPGGSLRLSCAASGFTFSSYAMSWVRQAPGKGLEWVSYISSSGSTIYYADSVKGRSTISRDNSKNTLYLQMNSLRAEDTAVYYCARVRQNSGSYAYWGQGTLVTVSSGGGGSGGGGSGGGGSQSVLTQPPSASGTPGQRVTISCTGTSSNIGAPYDVHWYQQLPGTAPKLLIYGNSNRPSGVPDRFSGSKSGTSASLAISGLRSEDXADYYCQSYDSSLSAVVFGGXTKLTVLGEQKLISEXXLSGSAA

SEQ ID NO: 58 - protein, 267 aa, Artificial Sequence
  IL-1beta (2) scFv antibody
  VARIANT 245: Any amino acid
  VARIANT 247: Any amino acid
  VARIANT 250: Any amino acid
  VARIANT 252: Any amino acid
  VARIANT 261: Any amino acid
EVQLLESGGGLVQPGGSLRLSCAASGFTFSRYVMTWVRQAPGKGLEWVSLISGGGSATYYADSMKGRFTISRDNSKNTLYLQMNSLRAEDTAVYYCAKRVPYDSSGYYPDAFDIWGQGTLVTVSSGGGGSGGGGSGGGGSQSVLTQPPSASGTPGQRVTISCTGSSSNIGAGYDVHWYQQLPGTAPKLLIYGNSNRPSGVPDQFSGSKSGTSASLAISGLRSEDEADYYCAAWDDSLNGPVFGGXTXLTXLXEQKLISEEXLSGSAA

SEQ ID NO: 59 - protein, 264 aa, Artificial Sequence
  IL-1beta (3) scFv antibody
  VARIANT 242: Any amino acid
  VARIANT 249: Any amino acid
  VARIANT 257..258: Any amino acids
EVQLLESGGGLVQPGGSLRLSCAASGFTFSSYWMSWVRQAPGKGLEWVAVVSYDGNNKYYADSRKGRFTISRDNSKNTLYLQMNSLRAEDTAMYYCASYWYTSGWYPYGMDVWGQGTLGTVSSGGGGSGGGGSGGGGSQSVLTQPPSASGTPGQRVTISCTGSSSNIGAGYDLHWYQQLPGTAPKLLIYRNNQRPSGVPDRFSGSKSGTSASLAISGLRSEDEADYYCSSYVDNNNLVFGGXTKLTVLXEQKLISEXXLSGSAA

SEQ ID NO: 60 - protein, 265 aa, Artificial Sequence
  Eotaxin (1) scFv antibody
  VARIANT 206: Any amino acid
  VARIANT 243: Any amino acid
  VARIANT 257..258: Any amino acids
  VARIANT 262: Any amino acid
EVQLLESGGGLVQPGGSLRLSCAASGFTFSSYWMSWVRQAPGKGLEWVSGVSWNGSRTHYADSVKGRFTISRDNSKNTLYLQMNSLRAEDTAVYYCVKGKGTIAMPGRARVGWWGQGTLVTVSSGGGGSGGGGSGGGGSQSVLTQPPSASGTPGQRVTISCSGSSSNIGNNAVNWYQQLPGTAPKLLIYANSNRPSGVPDRFSGSXSGTSASLAISGLRSEDEADYYCAAWDDSLSGPVFGGXTKLTVLGEQKLISXXDLSXSAA

SEQ ID NO: 61 - protein, 322 aa, Artificial Sequence
  Eotaxin (2) scFv antibody
  VARIANT 199: Any amino acid
  VARIANT 236: Any amino acid
  VARIANT 250..252: Any amino acids
  VARIANT 257: Any amino acid
  VARIANT 269: Any amino acid
  VARIANT 277..278: Any amino acids
  VARIANT 289: Any amino acid
  VARIANT 293..295: Any amino acids
  VARIANT 299: Any amino acid
  VARIANT 301..303: Any amino acids
  VARIANT 311..312: Any amino acids
  VARIANT 314..316: Any amino acids
  VARIANT 318..322: Any amino acids
EVQLLESGGGLVQPGGSLRLSCAASGFTFSAYWMTWVRQAPGKGLEWVSVIYSGGSTYYADSVKGRFTISRDNSKNTLYLQMNSLRAEDTAVYYCARQTQQEYFDYWGQGTLVTVSSGGGGSGGGGSGGGGSQSVLTQPPSASGTPGQRVTISCFGSNSNIGSSTVNWYQQLPGTAPKLLIYDNDKRPSGVPDRFSGSXSGTSASLAISGLRSEDEADYYCAAWDDSLNGPVFGGXTKLTVLGEQKLISXXXLSGSXAAHHHHHHSPRXPIRPIVSXXTIHWPSFYNVXTGKXXXLPNXIXXXHIPLSPAXXIXXXPXXXXX

SEQ ID NO: 62 - protein, 260 aa, Artificial Sequence
  Eotaxin (3) scFv antibody
  VARIANT 218: Any amino acid
  VARIANT 235: Any amino acid
  VARIANT 239: Any amino acid
EVQLLESGGGLVQPGGSLRLSCAASGFTFRGYAMSWVRQAPGKGLEWVSGVSWNGSRTHYADSVKGRFTISRDNSKNTLYLQMNSLRAEDTAVYYCARAPAVAGWFDPWGQGTLVTVSSGGGGSGGGGSGGGGSQSVLTQPPSASGTPGQRVTISCSGSSSNIGSHTVNWYQQLPGTAPKLLIYRNNQRPSGVPDRFSGSKSGTSASLAISGLRSEDXADYYCAAWDDSLSGRVXGGGXKLTVLGEQKLISEEDLSGSAA

SEQ ID NO: 63 - protein, 263 aa, Artificial Sequence
  RANTES (1) scFv antibody
  VARIANT 241: Any amino acid
  VARIANT 256..257: Any amino acids
EVQLLESGGGLVQPGGSLRLSCAASGFTFSSYGMHWVRQAPGKGLEWVAVISNDGTKKDYADSVKGRFTISRDNSKNTLYLQMNSLRAEDTAVYYCARDASGYDDYYFDYWGQGTLVTVSSGGGGSGGGGSGGGGSQSVLTQPPSASGTPGQRVTISCTGSSSNIGAGSDVHWYQQLPGTAPKLLIYRDDQRSSGVPDRFSGSKSGTSAFLAISGLRSEDEADYYCQSYDNSLSGWVFGGXTKLTVLGEQKLISEXXLSGSAA

SEQ ID NO: 64 - protein, 191 aa, Artificial Sequence
  RANTES (2) scFv antibody
EVQLLESGGGLVQPGGSLRLSCAASGFTFSSYAMSWVRQAPGKGLEWVSAISGSGGSTYYADSVKGRFTISRDNSKNTLYLQMNSLRAEDTAVYYCARDNDYSSDTFDYWGQGTLVTVSSGGGGSGGGGSGGGGSQSVLTQPPSAFGTPGQRVTISCSGSSSNIGSDYVYWYQQLPGTAPKLLIYSDNQRP

SEQ ID NO: 65 - protein, 263 aa, Artificial Sequence
  RANTES (3) scFv antibody
  VARIANT 241: Any amino acid
  VARIANT 256: Any amino acid
EVQLLESGGGLVQPGGSLRLSCAASGFTFSNYGMNWVRQAPGKGLEWVSGVSWNGSRTHYVDSVKRRFTISRDNSKNTLYLQMNSLRAEDTAVYYCARPRLRSHNYYGMDVWGQGTLVTVSSGGGGSGGGGSGGGGSQSVLTQPPSASGTPGQRVTISCSGSSFKSGKNYVSWYQQLPGTAPKLLIYRNNQRPSGVPDRFSGSKSGTSASLAISGLRSEDEADYYCAAWDVRVKGVIFGGXTKLTVLGEQKLISEXDLSGSAA

SEQ ID NO: 66 - protein, 258 aa, Artificial Sequence
  MCP-1 (1) scFv antibody
  VARIANT 215: Any amino acid
  VARIANT 236: Any amino acid
  VARIANT 243: Any amino acid
  VARIANT 251..252: Any amino acids
EVQLLESGGGLVQPGGSLRLSCAASGFTFSSYAMSWVRQAPGKGLEWVSGVSWNGSRTHYADSVKGRFTISRDNSKNTLYLQMNSLRAEDTAVYYCARGGHQQLGQWGQGTLVTVSSGGGGSGGGGSGGGGSQSVLTQPPSASGTPGQRVTISCSGSSSNIGNNYVSWYQQLPGTAPKLLIYRDSRRPSGVPDRFSGSKSGTSASLAISGLRSEXEADYYCAAWDDSLKGWLFGGXTKLTVLXEQKLISEXXLSGSAA

SEQ ID NO: 67 - protein, 261 aa, Artificial Sequence
  MCP-1 (2) scFv antibody
  VARIANT 239: Any amino acid
  VARIANT 246: Any amino acid
  VARIANT 254: Any amino acid
EVQLLESGGGLVQPGGSLRLSCAASGFTFSSYAMSWVRQAPGKGLEWVSYISSSSSYTNYADSVKGRFTISRDNSKNTLYLQMNSLRAEDTAVYYCARFRYNSGKMFDYWGQGTLVTVSSGGGGSGGGGSGGGGSQSVLTQPPSASGTPGQRVTISCSGSSSNIGRNTVNWYQQLPGTAPKLLIYGNSNRRSGVPDRFSGSKSGTSASLAISGLRSEDEADYYCAAWDDSLSGVVFGGXTKLTVLXEQKLISEXDLSGSAA

SEQ ID NO: 68 - protein, 261 aa, Artificial Sequence
  MCP-1 (3) scFv antibody
  VARIANT 219: Any amino acid
  VARIANT 239: Any amino acid
  VARIANT 253: Any amino acid
EVQLLESGGGLVQPGGSLRLSCAASGFTFSNYGMHWVRQAPGKGLEWVAVISYDGSNKYYADSVKGRFTISRDNSKNTLYLQMNSLRAEDTAVYYCAKSHYYDTTSFDYWGQGTLVTVSSGGGGSGGGGSGGGGSQSVLTQPPSASGTPGQRVTISCSGSSSNIGTNPVNWYQQLPGTAPKLLIYDNNKRPSGVPDRFSGSKSGTSASLAISGLRSEDXADYYCAAWDDSLSGVVFGGXTKLTVLGEQKLISXEDLSGSAA

SEQ ID NO: 69 - protein, 263 aa, Artificial Sequence
  MCP-3 (1) scFv antibody
  VARIANT 222: Any amino acid
  VARIANT 241: Any amino acid
EVQLLESGGGLVQPGGSLRLSCAASGFTFSTYGMHWVRQAPGKGLEWVSGVSWNGSRTHYVNSVKRRFTISRDNSKNTLYLQMNSLRAEDTAVYYCARVAPGSGKRLRAFDIWGQGTLVTVSSGGGGSGGGGSGGGGSQSVLTQPPSASGTPGQRVTISCSGSSSNIGNNAVNWYQQLPGTAPKLLIYEVSKRPPGVPDRFSGSKSGTSASLAISGLRSEDXADYYCSSYAGSSKWVFGGXTKLTVLGEQKLISEEDLSGSAA

SEQ ID NO: 70 - protein, 256 aa, Artificial Sequence
  MCP-3 (2) scFv antibody
  VARIANT 234: Any amino acid
  VARIANT 248..250: Any amino acids
EVQLLESGGGLVQPGGSLRLSCAASGFTLSSNYMSWVRQAPGKGLEWVSGISASGHSTHYADSGKARFTISRDNSKNTLYLQMNSLRAEDTAVYYCARGKSLAYWGQGTLVTVSSGGGGSGGGGSGGGGSQSVLTQPPSASGTPGQRVTISCSGSSSNIGNNAVNWYQQLPGTAPKLLIYRNNQRPSGVPDRFSGSKSGTSASLAISGLRSEDEADYYCAAWDDSLSVVVFGGXTKLTVLGEQKLISXXXLSGSAA

SEQ ID NO: 71 - protein, 261 aa, Artificial Sequence
  MCP-3 (3) scFv antibody
  VARIANT 221: Any amino acid
  VARIANT 238..239: Any amino acids
  VARIANT 254..255: Any amino acids
EVQLLESGGGLVQPGGSLRLSCAASGFTFSIYWMSWVRQAPGKGLEWVAYIGGISNTVSYSDSVKGRFTISRDNSKNTLYLQMNSLRAEDTAVYYCAKAPGYSSGWGWFDPWGQGTLVTVSSGGGGSGGGGSGGGGSQSVLTQPPSASGTPGQRVTISCSGSSSNIGTNSVFWYQQLPGTAPKLLIYGNNNRPSGVPDRFSGSKSGTSASLAISGLRSEDXADYYCMIWHSSASVFGXXTKLTVLGEQKLISEXXLSGSAA

SEQ ID NO: 72 - protein, 252 aa, Artificial Sequence
  beta-galactosidase scFv antibody
  VARIANT 200: Any amino acid
  VARIANT 235: Any amino acid
  VARIANT 243: Any amino acid
EVQLLESGGGLVQPGGSLRLSCAASGFTFSSYAMHWVRQAPGKGLEWVAVIAYDGINEYYGDSVKGRFTISRDNSKNTLYLQMNSLRAEDTAVYYCARGGIYHGFDIWGQGTLVTVSSGGGGSGGGGSGGGGSQSVLTQPPSASGTPGQRVTISCSGSSSNIGSNYVYWYQQLPGTAPKLLIYDNHKRPSGVPDRFSGSXSGTSASLAISGLRSEDEADYYCAAWDDNSWVFGGXTKLTVLGXYKDDDDKAA

SEQ ID NO: 73 - protein, 305 aa, Artificial Sequence
  Angiomotin (1) scFv antibody
  VARIANT 201: Any amino acid
  VARIANT 218: Any amino acid
  VARIANT 238: Any amino acid
  VARIANT 248: Any amino acid
  VARIANT 261..262: Any amino acids
  VARIANT 267..268: Any amino acids
  VARIANT 281: Any amino acid
  VARIANT 292: Any amino acid
  VARIANT 294..295: Any amino acids
  VARIANT 298: Any amino acid
  VARIANT 300..302: Any amino acids
  VARIANT 304..305: Any amino acids
EVQLLESGGGLVQPGGSLRLSCAASGFTFSDHYMDWVRQAPGKGLEWVSGVSWNGSRTHYADSVKGRFTISRDNSKNTLYLQMNSLRAEDTAVYYCARDTWAYGAFDIWGQGTLVTVSSGGGGSGGGGSGGGGSQSVLTQPPSASGTPGQRVTISCSGSNSNIGRNTVNWYQQLPGTAPKLLIYRDNQRPSGVPDRFSGSXSGTPASLAISGLRSEDXADYYCAAWDVSLNGWVFGGXTKLTVLGDYXDHDGDYKDHDIDXXDDDDXXAAHHHHHHSPRWXIRPIVSRITIXWXXFYXVXXXKXX

SEQ ID NO: 74 - protein, 320 aa, Artificial Sequence
  Angiomotin (2) scFv antibody
  VARIANT 237: Any amino acid
  VARIANT 245: Any amino acid
  VARIANT 265: Any amino acid
  VARIANT 268: Any amino acid
  VARIANT 279..281: Any amino acids
  VARIANT 283: Any amino acid
  VARIANT 287: Any amino acid
  VARIANT 289: Any amino acid
  VARIANT 292..294: Any amino acids
  VARIANT 298..299: Any amino acids
  VARIANT 304..309: Any amino acids
  VARIANT 311..312: Any amino acids
  VARIANT 315..317: Any amino acids
  VARIANT 319..320: Any amino acids
EVQLLESGGGLVQPGGSLRLSCAASGFTFNDYYMTWIRQAPGKGLEWVSYISSSGSTIYYADSVKGRFTISRDNSKNTLYLQMNSLRAEDTAVYYCARERLPDVFDVWGQGTLVTVSSGGGGSGGGGSGGGGSQSVLTQPPSASGTPGQRVTISCSGSGSNIGTNSVSWYQQLPGTAPKLLIYFDDLLPSGVPDRFSGSKSGTSASLAISGLRSEDEADYYCAAWDDSLSGVVFGGXTKLTVLGXYKDHDGDYKDHDIDYKDDDXKAXAHHHHHHSPRXXXRXIVSXIXIHXXXFYNXXTGKTXXXXXXIXXAAXXXFXX

SEQ ID NO: 75 - protein, 256 aa, Artificial Sequence
  Leptin scFv antibody
  VARIANT 239: Any amino acid
  VARIANT 247: Any amino acid
  VARIANT 251: Any amino acid
EVQLLESGGGLVQPGGSLRLSCAASGFTFGDFAMSWVRQAPGKGLEWVANIKQDGSVKYYVDSVKGRFTISRDNSKNTLYLQMNSLRAEDTAVYYCARFLAGFYYGMDVWGQGTLVTVSSGGGGSGGGGSGGGGSQSVLTQPPSASGTPGQRVTISCSGSDSNIGGNTVNWYQQLPGMAPKLLIYYDDLLPSGVPDRFSGSKSGTSASLAISGLRSEDEADYYCAAYDDTMNGWGFGGXTKLTVLGXYKDXDDKAA

SEQ ID NO: 76 - protein, 261 aa, Artificial Sequence
  Integrin alpha-10 scFv antibody
  VARIANT 239: Any amino acid
  VARIANT 254: Any amino acid
EVQLLESGGGLVQPGGSLRLSCAASGFTFSTYNMNWVRQAPGKGLEWVSTISGSGGRTYYADSVKGRFTISRDNSKNTLYLQMNSLRAEDTAVYYCARDRVATLDAFDIWGQGTLVTVSSGGGGSGGGGSGGGGSQSVLTQPPSASGTPGQRVTISCSGSSSNIGSNSVSWYQQLPGTAPKLLIYSNNQRPSGVPDRFSGSKSGTSASLAISGLRSEDEADYYCAAWDDSLSGVVFGGXTKLTVLGEQKLISEXDLSGSAA

SEQ ID NO: 77 - protein, 262 aa, Artificial Sequence
  Integrin alpha-11 scFv antibody
  VARIANT 202: Any amino acid
  VARIANT 232: Any amino acid
  VARIANT 240: Any amino acid
  VARIANT 247: Any amino acid
  VARIANT 255..256: Any amino acids
EVQLLESGGGLVQPGGSLRLSCAASGFTFRRDWMSWVRQVPGKGLEWVSVISGSDGSTYYADSVKGRFTISRDNSKNTLYLQMNSLRAEDTAVYYCASYSPLGNWFDSWGQGTLVTVSSGGGGSGGGGSGGGGSQSVLTQPPSASGTPGQRVTISCTGSSSNIGAGYDVHWYQQLPGTAPKLLIYSDTYRPSGVPDRFSGSXSGTSASLAISGLRSEDEADYYCQSYDSSLXGFVVFGGXTKLTVLXEQKLISEXXLSGSAA

SEQ ID NO: 78 - protein, 257 aa, Artificial Sequence
  IgM (1) scFv antibody
  VARIANT 235: Any amino acid
  VARIANT 239: Any amino acid
  VARIANT 249..251: Any amino acids
EVQLLESGGGLVQPGGSLRLSCAASGFTFSDYYMSWIRQAPGKGLEWVSAIGSGPYYAHSVRDRFTISRDNSKNTLYLQMNSLRAEDTAVYYCARGGVEASFDYWGQGTLVTVSSGGGGSGGGGSGGGGSQSVLTQPPSASGTPGQRVTISCTGSSSNIGAGYDVHWYQQLPGTAPKLLIYGNTNRPSGVPNRFSGSKSGTSASLAISGLRSEDEADYYCQSYDNDLSGWVFGGXTKLXVLGEQKLISXXXLSGSAA

SEQ ID NO: 79 - protein, 261 aa, Artificial Sequence
  LDL (1) scFv antibody
  VARIANT 254..255: Any amino acids
EVQLLESGGGLVQPGGSLRLSCAASGFTFSDYYMSWVRQAPGKGLEWVSGVSWNGSRTHYADSVKGRFTISRDNSKNTLYLQMNSLRAEDTAVYYCARAARYSYYYYGMDVWGQGTLVTVSSGGGGSGGGGSGGGGSQSVLTQPPSASGTPGQRVTISCSGSSSNIGNNAVNWYQQLPGTAPKLLIYGNDRRPSGVPDRFSGSKSGTSASLAISGLRSEDEADYYCQTWGTGRGVFGGGTKLTVLGEQKLISEXXLSGSAA

SEQ ID NO: 80 - protein, 275 aa, Artificial Sequence
  LDL (2) scFv antibody
  VARIANT 198: Any amino acid
  VARIANT 207: Any amino acid
  VARIANT 224: Any amino acid
  VARIANT 244: Any amino acid
  VARIANT 251..252: Any amino acids
  VARIANT 261: Any amino acid
  VARIANT 270..271: Any amino acids
EVQLLESGGGLVQPGGSLRLSCAASGFTFSNAWMSWVRQAPGKGLEWVSSISTSSNYIYYADSVKGRFTISRDNSKNTLYLQMNSLRAEDTAVYYCARVKKYSSGWYSNYAFDIWGQGTLVTVSSGGGGSGGGGSGGGGSQSVLTQPPSASGTPGQRVTISCSGSSSSIGNNFVSWYQQLPGTAPKLLIYDNNKRPSXVPDRFSGSXSGTSASLAISGLRSEDXADYYCAAWDDSLNGWVFGGXTKLTVLXXYKDHDGDYXDHDIDYKDXXDKAA

SEQ ID NO: 81 - protein, 262 aa, Artificial Sequence
  PSA scFv antibody
  VARIANT 207: Any amino acid
  VARIANT 245: Any amino acid
  VARIANT 257..258: Any amino acids
EVQLLESGGGLVQPGGSLRLSCAASGFTFRSYEMNWVRQAPGKGLEWVAVIGGNGVDTDYADSVKGRFTISRDNSKNTLYLQMNSLRAEDTAVYYCVREEVDFWSGYYSYGMDVWGQGTLVTVSSGGGGSGGGGSGGGGSQSVLTQPPSASGTPGQRVTISCSGSSSNIGDNFVSWYQQLPGTAPKLLIYRTNGRPSGVPDRFSGSXSGTSASLAISGLRSEDEADYYCATWDDNLNGRVVFGGXTKLTVLGDYKDXXDKAA

SEQ ID NO: 82 - protein, 255 aa, Artificial Sequence
  Lewis x (1) scFv antibody
  VARIANT 238: Any amino acid
EVQLLESGGGLVQPGGSLRLSCAASGFTFSNYWMHWVRQAPGKGLEWVANIKEDGSEKYYVDSVKGRFTISRDNSKNTLYLQMNSLRAEDTAVYYCAREGETSFGLDVWGQGTLVTVSSGGGGSGGGGSGGGGSQSVLTQPPSASGTPGQRVTISCSGSSSNIGSNTVNWYQQLPGTAPKLLIYSNNQRPSGVPDRFSGSKSGTSASLAISGLRSEDEADYYCASWDDSLSGWVFGGXTKLTVLGDYKDDDDKAA

SEQ ID NO: 83 - protein, 258 aa, Artificial Sequence
  Lewis x (2) scFv antibody
  VARIANT 219: Any amino acid
  VARIANT 241: Any amino acid
  VARIANT 249: Any amino acid
  VARIANT 253..254: Any amino acids
EVQLLESGGGLVQPGGSLRLSCAASGFTFSRYWMHWVRQAPGKGLEWVANIKPDGSEQYYADSVKGRFTISRDNSKNTLYLQMNSLRAEDTAVYYCAREGLSSGWSYGMDVWGQGTLVTVSSGGGGSGGGGSGGGGSQSVLTQPPSASGTPGQRVTISCSGSNSNIGSNTVNWYQQLPGTAPKLLIYTNINRPSGVPDRFSGSKSGTSASLAISGLRSXDEADYYCATWDDSLSGWVFGGXTKLTVLGXYKDXXDKAA

SEQ ID NO: 84 - protein, 258 aa, Artificial Sequence
  Lewis y scFv antibody
  VARIANT 220: Any amino acid
  VARIANT 241: Any amino acid
  VARIANT 248: Any amino acid
  VARIANT 252: Any amino acid
EVQLLESGGGLVQSGGSLRLSCAASGFTFSSYTLHWVRQAPGKGLEYVSAISSNGGSTYYADSVKGRFTISRDNSKNTLYLQMNSLRAEDTAVYYCASDVYGDYPRGLDYWGQGTLVTVSSGGGGSGGGGSGGGGSQSVLTQPPSASGTPGQRVTISCSGTTSNIGSNYVHWYQQLPGTAPKLLIYGNNNRPSGVPDRFSGSKSGTSASLAISGLRSEDXADYYCQSYDRSLGGLRVFGGXTKLTVLXDYKXDDDKAA

SEQ ID NO: 85 - protein, 294 aa, Artificial Sequence
  Sialle x scFv antibody
  VARIANT 217: Any amino acid
  VARIANT 237: Any amino acid
  VARIANT 252: Any amino acid
  VARIANT 258: Any amino acid
  VARIANT 265..272: Any amino acids
  VARIANT 274..291: Any amino acids
  VARIANT 293..294: Any amino acids
EVQLLESGGGLVQPGGSLRLSCAASGFTLSSYAMSWVRQAPGKGLEWVSSISSGNSYIYYADSVKGRFTISRDNSKNTLYLQMNSLRAEDTAVYYCARGRGRGGGFELWGQGTLVTVSSGGGGSGGGGSGGGGSQSVLTQPPSASGTPGQRVTISCSGSSSNIGTYTVNWYQQLPGTAPKLLIYSNNQRPSGVPDRFSGSKSGTSASLAISGLRSEXEADYYCSSNAGIDNILFGGXTKLTVLGEQKLISEXDLSGSXAAHHHHXXXXXXXXIXXXXXXXXXXXXXXXXXXLXX

SEQ ID NO: 86 - protein, 264 aa, Artificial Sequence
  TM peptide scFv antibody
  VARIANT 158: Any amino acid
  VARIANT 188: Any amino acid
  VARIANT 196..197: Any amino acids
  VARIANT 207: Any amino acid
  VARIANT 233: Any amino acid
  VARIANT 242..243: Any amino acids
  VARIANT 246: Any amino acid
  VARIANT 255..257: Any amino acids
  VARIANT 261: Any amino acid
EVQLLESGGGLVQPGGSLRLSCAASGFTFSSYGFHWVRQAPGKGLEWVSLISWDGGSTYYADSVKGRFTISRDNSKNTLYLQMNSLRAEDTAVYYCARGTWFDPWGQGTLVTVSSGGGGSGGGGSGGGGSQSVLTQPPSASGTPGQRVTISCSGSSSXIGNNAVNWYQQLPGTAPKLLIYRNNQRPSXVPDRFSGXXSGTSASLAIXGLRSEDEADYYCAAWDDSLSWVFGGXTKLTVLGDXXTMXVIIKIMTSXXXMTMXRRP

SEQ ID NO: 87 - protein, 254 aa, Artificial Sequence
  Procathepsin W scFv antibody
  VARIANT 200: Any amino acid
  VARIANT 237: Any amino acid
  VARIANT 245: Any amino acid
  VARIANT 248: Any amino acid
EVQLLESGGGLVQPGGSLRLSCAASGFTFSSYAMSWVRQAPGKGLEWVSSMSASGGSTYYADSVKGRFTISRDNSKNTLYLQMNSLRAEDTAVYYCARDRGSYGMDVWGQGTLVTVSSGGGGSGGGGSGGGGSQSVLTQPPSASGTPGQRVTISCSGSTSNIGSYAVNWYQQLPGTAPKLLIYGNNNRPSGVPDRFSGSXSGTSASLAISGPRSEDEADYYCAAWDDSLNGGVFGGXTKLTVLGXYKXDDDKAA

SEQ ID NO: 88 - protein, 188 aa, Artificial Sequence
  BTK (1) scFv antibody
  VARIANT 166: Any amino acid
EVQLLESGGGLVQPGGSLRLSCAASGFTFSNYAMSWVRQAPGKGLEWVSGINWNGGSTGYADSVKGRFTISRDNSKNTLYLQMNSLRAEDTAVYYCAKHLKRYSGSSYLFDYWGQGTLVTVSSGGGGSGGGGSGGGGSQSVLTQPPSASGTPGQRVTISCSGSSSXIGSNYVYWYQQLPGTAPKLLIY

SEQ ID NO: 89 - protein, 258 aa, Artificial Sequence
  Digoxin scFv antibody
  VARIANT 236: Any amino acid
  VARIANT 250..252: Any amino acids
  VARIANT 255: Any amino acid
EVQLLESGGGLVQPGGSLRLSCAASGFTFSSYAMSWVRQAPGKGLEWVAVIWHDGSSKYYADSVKGRFTISRDNSKNTLYLQMNSLRAEDTAVYYCARATGDGFDYWGQGTLVTVSSGGGGSGGGGSGGGGSQSVLTQPPSASGTPGQRVTISCSGSSSNIGSNYVYWYQQLPGTAPKLLIYRNNQRPSGVPDRFSGSKSGTSASLAISGLRSEDEADYYCAAWDDSLNGVVFGGXTKLTVLGEQKLISXXXLSXSAA

SEQ ID NO: 90 - protein, 262 aa, Artificial Sequence
  GLP-1 R scFv antibody
  VARIANT 245: Any amino acid
EVQLLESGGGLVQPGGSLRLSCAASGFTFRSYGMHWVRQAPGKGLEWVSGLSWNSAGTGYADSVKGRFTISRDNSKNTLYLQMNSLRAEDTAVYYCAKEMGNNWDHIDYWGQGTLVTVSSGGGGSGGGGSGGGGSQSVLTQPPSASGTPGQRVTISCTGSSSNIGAGYDVHWYQQLPGTAPKLLIYGNSNRPSGVPDRFSGSKSGTSASLAISGLRSEDEADYYCAAWDDGLSGPVFGGGTKLTXLGEQKLISEEDLSGSAA

SEQ ID NO: 91 - protein, 260 aa, Artificial Sequence
  GLP-1 scFv antibody
  VARIANT 238: Any amino acid
  VARIANT 245: Any amino acid
  VARIANT 252: Any amino acid
  VARIANT 254: Any amino acid
EVQLLESGGGLVQPGGSLRLSCAASGFTFNSYGMHWVRQAPGKGLEWVSAISGSGGSTYYAESVKGRSTISRDNSKNTLYLQMNSLRAEDTAVYYCVTRNAVFGFDVWGQGTLVTVSSGGGGSGGGGSGGGGSQSVLTQPPSASGTPGQRVTISCTGSSSNIGAGFDVHWYQQLPGTAPKLLIYDNNKRPSGVPDRFSGSKSGTSASLAISGLRSEDEADYYCQSFDSSLSGVVFGGXTKLTVLXEQKLISXEXLSGSAA

SEQ ID NO: 92 - protein, 320 aa, Artificial Sequence
  C1q scFv antibody
  VARIANT 197: Any amino acid
  VARIANT 223: Any amino acid
  VARIANT 244: Any amino acid
  VARIANT 259..260: Any amino acids
  VARIANT 267..268: Any amino acids
  VARIANT 283: Any amino acid
  VARIANT 286: Any amino acid
  VARIANT 289..290: Any amino acids
  VARIANT 295..300: Any amino acids
  VARIANT 302..303: Any amino acids
  VARIANT 306..307: Any amino acids
  VARIANT 309..311: Any amino acids
  VARIANT 313: Any amino acid
  VARIANT 315..320: Any amino acids
EVQLLESGGGLVQPGGSLRLSCAASGFTFDDYGMSWVRQVPGKGLEWVSAISGSGATTFYAHSVQGRFTISRDNSKNTLYLQMNSLRAEDTAVYYCARGGRGYDWPSGAFDIWGQGTLVTVSSGGGGSGGGGSGGGGSQSVLTQPPSASGTPGQRVTISCTGSSSNIGAGYDVHWYQQLPGTAPKLLIYENNKRPSXVPDRFSGSKSGTSASLAISGLRSEDXADYYCAAWDDSVNGYVVFGGXTKLTVLGEQKLISEXXLSGSAAXXHHHHHSPRWPIRPIXSRXTIXXPSFYXXXXXXTXXLPXXIXXXHXPXXXXXX

SEQ ID NO: 93 - protein, 262 aa, Artificial Sequence
  C1s scFv antibody
  VARIANT 202: Any amino acid
  VARIANT 240..241: Any amino acids
  VARIANT 247: Any amino acid
  VARIANT 250: Any amino acid
  VARIANT 254..256: Any amino acids
EVQLLESGGGLVQPGGSLRLSCAASGFTFSSYAMSWVRQAPGKGLEWVSGVSWNGSRTHYADSVKGRFTISRDNSKNTLYLQMNSLRAEDTAVYYCARHMKAAAYVFEIWGQGTLVTVSSGGGGSGGGGSGGGGSQSVLTQPPSASGTPGQRVTISCSGSSSNIGSTAVNWYQQLPGTAPKLLIYSNNKRPSGVPDRFSGSXSGTSASLAISGLRSEDEADYYCAAWDDRLNGNVLFGGXXKLTVLXEQXLISXXXLSGSAA

SEQ ID NO: 94 - protein, 261 aa, Artificial Sequence
  C3 (1) scFv antibody
  VARIANT 239: Any amino acid
  VARIANT 253..255: Any amino acids
EVQLLESGGGLVQPGGSLRLSCAASGFTFSSYAMSWVRQAPGKGLEWVSSVTGSGGGTYYADSVEGRFTISRDNSKNTLYLQMNSLRAEDTAVYYCARYRWFGNDAFDIWGQGTLVTVSSGGGGSGGGGSGGGGSQSVLTQPPSASGTPGQRVTISCSGSASNLGMHFVSWYQQLPGTAPKLLIYGNSNRPSGVPDRFSGSKSGTSASLAISGLRSEDEADYYCAAWDDTLNIWVFGGXTKLTVLGEQKLISXXXLSGSAA

SEQ ID NO: 95 - protein, 263 aa, Artificial Sequence
  C3 (2) scFv antibody
  VARIANT 220: Any amino acid
  VARIANT 241: Any amino acid
  VARIANT 249: Any amino acid
EVQLLESGGGLVQPGGSLRLSCAASGFTFSTYRMIWVRQAPGKGLEWVSSISGSNTYIHYADSVRGRFTISRDNSKNTLYLQMNSLRAEDTAVYYCARDRHPLLPSGMDVWGQGTLVTVSSGGGGSGGGGSGGGGSQSVLTQPPSASGTPGQRVTISCSGSSSNIGKHPVNWYQQLPGTAPKLLIYRNDQRPSGVPDRFSGSKSGTSASLAISGLRSEDXADYYCQSYDSSLSGSWVFGGXTKLTVLGXQKLISEEDLSGSAA

SEQ ID NO: 96 - protein, 263 aa, Artificial Sequence
  C4 (1) scFv antibody
  VARIANT 241: Any amino acid
  VARIANT 248: Any amino acid
  VARIANT 256..257: Any amino acids
EVQLLESGGGLVQPGGSLRLSCAASGFTFSSYPMSWVRQAPGKGLEWVSTLYAGGWTSYADSVWGRFTISRDNSKNTLYLQMNSLRAEDTAVYYCARPKVESLSRYGMDVWGQGTLVTVSSGGGGSGGGGSGGGGSQSVLTQPPSASGTPGQRVTISCTGSSSNIGAGYVVHWYQQLPGTAPKLLIYDNSKRPSGVPDRFSGSKSGTSASLAISGLRSEDEADYYCQSYDSSLSGVVFGGXTKLTVLXEQKLISEXXLSGSAA

SEQ ID NO: 97 - protein, 264 aa, Artificial Sequence
  C5 (1) scFv antibody
  VARIANT 196: Any amino acid
  VARIANT 205: Any amino acid
  VARIANT 215: Any amino acid
  VARIANT 222: Any amino acid
  VARIANT 240: Any amino acid
  VARIANT 242..243: Any amino acids
  VARIANT 249: Any amino acid
  VARIANT 257..258: Any amino acids
  VARIANT 263: Any amino acid
EVQLLESGGGLVQPGGSLRLSCAASGFTFSSYRMNWVRQAPGKGLEWVSAISGSGGSTYYADSVKGRFTISRDNSKNTLYLQMNSLRAEDTAVYYCARGGGWFSGHYYFDYWGQGTLVTVSSGGGGSGGGGSGGGGSQSVLTQPPSASGTPGQRVTISCTGATSNIGAGYDVHWYQQLPGTAPKLLIYRNNQRPSXVPDRFSGSXSGTSASLAIXGLRSEDXADYYCQSYDSSLRHWVFXGXXKLTVLXEQKLISEXXLSGSXA

SEQ ID NO: 98 - protein, 258 aa, Artificial Sequence
  C5 (2) scFv antibody
  VARIANT 216: Any amino acid
  VARIANT 236: Any amino acid
  VARIANT 243: Any amino acid
  VARIANT 252: Any amino acid
EVQLLESGGGLVQPGGSLRLSCAASGFTFSAYSMNWVRQAPGKGLEWVSGVSWNGSRTHYADSVKGRFTISRDNSKNTLYLQMNSLRAEDTAVYYCARENSGFFDYWGQGTLVTVSSGGGGSGGGGSGGGGSQSVLTQPPSASGTPGQRVTISCTGSSSNIGSNTVNWYQQLPGTAPKLLIYGNSNRPSGVPDRFSGSKSGTSASLTISGLRSEDXADYYCAAWDDSLSGWVFGGXTKLTVLXEQKLISEEXLSGSAA

SEQ ID NO: 99 - protein, 261 aa, Artificial Sequence
  C1 inh. (1) scFv antibody
  VARIANT 19: Any amino acid
  VARIANT 218..219: Any amino acids
  VARIANT 239: Any amino acid
  VARIANT 246: Any amino acid
  VARIANT 254..255: Any amino acids
  VARIANT 258: Any amino acid
EVQLLESGGGLVQPGGSLXLSCAASGFTFSDYYMSWIRQAPGKGLEWVSGISRGGEYTFYVDSVKGRFTISRDNSKNTLYLQMNSLRAEDTAVYYCARDPGGLDAFDIWGQGTLVTVSSGGGGSGGGGSGGGGSQSVLTQPPSASGTPGQRVTISCTGSSSNIGARYDVQWYQQLPGTAPKLLIYGNSNRPSGVPDRFSGSKSGTSASLAISGLRSEXXADYYCASWDDSLSGPVFGGXTKLTVLXEQKLISEXXLSXSAA

SEQ ID NO: 100 - protein, 262 aa, Artificial Sequence
  Factor B (1) scFv antibody
  VARIANT 219: Any amino acid
  VARIANT 240: Any amino acid
  VARIANT 255: Any amino acid
EVQLLESGGGLVQPGGSLRLSCAASGFTFSSYSMNWVRQAPGKGLEWVAVISYDGRFIYYSDSVKGRFTISRDNSKNTLYLQMNSLRAEDTAVYYCARSYGGNLAMDVWGQGTLVTVSSGGGGSGGGGSGGGGSQSVLTQPPSASGTPGQRVTISCTGSSSNIGAGYDVHWYQQLPGTAPKLLIYDNNKRPSGVPDRFSGSNSGTSASLAISGLRSEDXADYYCAAWDDRLNGRVVFGGXTKLTVLGEQKLISEXDLSGSAA

SEQ ID NO: 101 - protein, 262 aa, Artificial Sequence
  IL-12 (3) scFv antibody
  VARIANT 163: Any amino acid
  VARIANT 220: Any amino acid
  VARIANT 240..241: Any amino acids
  VARIANT 255: Any amino acid
EVQLLESGGGLVQPGGSLRLSCAASGFTFSRYGMHWVRQAPGKGLEWVASIRGNARGSFYADSVKGRFTISRDNSKNTLYLQMNSLRAEDTAVYYCAKGDSSGWYFFDYWGQGTLVTVSSGGGGSGGGGSGGGGSQSVLTQPPSASGTPGQRVTISCTGSDSXIGAGFDVHWYQQLPGTAPKLLIYGNNNRPSGVPDRFSGSKSGTSASLAISGLRSEDXADYYCQSYDTSLSGVLFGGXXKLTVLGEQKLISEXDLSGSAA

SEQ ID NO: 102 - protein, 254 aa, Artificial Sequence
  IL-12 (4) scFv antibody
  VARIANT 232: Any amino acid
  VARIANT 239: Any amino acid
  VARIANT 246: Any amino acid
EVQLLESGGGLVQPGGSLRLSCAASGFTFSDYGMHWVRQAPGKGLEWVSTVSGSGDNTYYADSVKGRFTISRDNSKNTLYLQMNSLRAEDTAVYYCTTTWRYWGQGTLVTVSSGGGGSGGGGSGGGGSQSVLTQPPSASGTPGQRVTISCSGSSSNIGSNTVNWYQQLPGTAPKLLIYGNSNRPSGVPDRFSGSKSGTSASLAISGLRSEDEADYYCQSYDSSLSGWVFGGXTKLTVLXEQKLISXEDLSGSAA

SEQ ID NO: 103 - protein, 259 aa, Artificial Sequence
  IL-16 (3) scFv antibody
  VARIANT 3: Any amino acid
  VARIANT 214..215: Any amino acids
  VARIANT 225: Any amino acid
  VARIANT 237: Any amino acid
  VARIANT 241: Any amino acid
EVXLLESGGGLVQPGGSLRLSCAASGFTFSSYGMHWVRQAPGKGLEWVSGINWNGGSTGYADSVKGRFTISRDNSKNTLYLQMNSLRAEDTAVYYCARERGDAFDIWGQGTLVTVSSGGGGSGGGGSGGGGSQSVLTQPPSASGTPGQRVTISCSGSSSNIGSNTVNWYQQLPGTAPKLLIYSDNQRPSGVPDRFSGSKSGTSASLAISGLRSXXEADYYCAAWXDSLNGPWVFGGXTKLXVLGEQKLISEEDLSGSAA

SEQ ID NO: 104 - protein, 263 aa, Artificial Sequence
  IL-18 (3) scFv antibody
  VARIANT 204: Any amino acid
  VARIANT 220..221: Any amino acids
  VARIANT 241: Any amino acid
  VARIANT 245: Any amino acid
  VARIANT 255..257: Any amino acids
  VARIANT 260: Any amino acid
EVQLLESGGGLVQPGGSLRLSCAASGFTFSRYGMHWVRQAPGKGLEWVAVISYDGSNKYYADSVKGRFTISRDNSKNTLYLQMNSLRAEDTAVYYCARHGYGDSRSAFDIWGQGTLVTVSSGGGGSGGGGSGGGGSQSVLTQPPSASGTPGQRVTISCTGSSSNIGAGYDVHWYQQLPGTAPKLLIYRNNQRPSGVPDRFSGSXSGTSASLAISGLRSEXXADYYCQSYDSSLSRWVFGGXTKLXVLGEQKLISXXXLSXSAA

SEQ ID NO: 105 - protein, 266 aa, Artificial Sequence
  IL-1a (3) scFv antibody
  VARIANT 169: Any amino acid
  VARIANT 199: Any amino acid
  VARIANT 208: Any amino acid
  VARIANT 227: Any amino acid
  VARIANT 233: Any amino acid
  VARIANT 239: Any amino acid
  VARIANT 244: Any amino acid
  VARIANT 258..260: Any amino acids
EVQLLESGGGLVQPGGSLRLSCAASGFTFSSYSMNWVRQAPGKGLEWVSYISSSSSYTNYADSVKGRFTISRDNSKNTLYLQMNSLRAEDTAVYYCARSVTRRAGYYYYYSGMDVWGQGTLVTVSSGGGGSGGGGSGGGGSQSVLTQPPSASGTPGQRVTISCSGSSSXIGSNTVNWYQQLPGTAPKLLIYRNNQRPSXVPDRFSGSXSGTSASLAISGLRSEDEAXYYCSSXAGSNSXVFGGXTKLTVLGEQKLISXXXLSGSAA

SEQ ID NO: 106 - protein, 260 aa, Artificial Sequence
  IL-6 (3) scFv antibody
  VARIANT 219: Any amino acid
  VARIANT 238: Any amino acid
  VARIANT 253..254: Any amino acids
EVQLLESGGGLVQPGGSLRLSCAASGFTFSNYGMHWVRQAPGKGLEWVSSITSSGDGTYFADSVKGRFTISRDNSKNTLYLQMNSLRAEDTAVYYCARAGGIAAAYAFDIWGQGTLVTVSSGGGGSGGGGSGGGGSQSVLTQPPSASGTPGQRVTISCSGSSSNVGSNYVYWYQQLPGTAPKLLIYDNNKRPSGVPDRFSGSKSGTSASLAISGLRSEXEADYYCQSYDSSRWVFGGXTKLTVLGEQKLISEXXLSGSAA

SEQ ID NO: 107 - protein, 319 aa, Artificial Sequence
  IL-6 (4) scFv antibody
  VARIANT 145: Any amino acid
  VARIANT 214: Any amino acid
  VARIANT 240: Any amino acid
  VARIANT 247: Any amino acid
  VARIANT 254..255: Any amino acids
  VARIANT 262: Any amino acid
  VARIANT 270: Any amino acid
  VARIANT 274..275: Any amino acids
  VARIANT 282: Any amino acid
  VARIANT 287..288: Any amino acids
  VARIANT 292: Any amino acid
  VARIANT 298: Any amino acid
  VARIANT 300..301: Any amino acids
  VARIANT 306..308: Any amino acids
  VARIANT 311: Any amino acid
  VARIANT 314..317: Any amino acids
  VARIANT 319: Any amino acid
EVQLLESGGGLVQPGGSLRLSCAASGFTFSSNYMSWVRQAPGKGLEWVSSISSSSTIYYADSVKGRFTISRDNSKNTLYLQMNSLRAEDTAVYYCARQPASGTYDAFDIWGQGTLVTVSSGGGGSGGGGSGGGGSQSVLTQPPSXSGTPGQRVTISCTGSSSNIGAGYDVHWYQQLPGTAPKLLIYYDDLLPSGVPDRFSGSKSGTSASLAISXLRSEDEADYYCAVWDDSLSGWVFGGXTKLTVLXEQKLISXXDLSGSAXAHHHHHHXSPRXXIRPIVSXITIHXXVVLXRRDWEXPXXTQLNXXXAHXPFXXXXNX

SEQ ID NO: 108 - protein, 259 aa, Artificial Sequence
  IL-8 (3) scFv antibody
  VARIANT 4: Any amino acid
  VARIANT 215: Any amino acid
  VARIANT 237: Any amino acid
  VARIANT 252..253: Any amino acids
EVQXLESGGGLVQPGGSLRLSCAASGFTFDDYGMSWVRQAPGKGLEWVSLISWDGGSTYYADSVKGRFTISRDNSKNTLYLQMNSLRAEDTAVYYCARDDLYGMDVWGQGTLVTVSSGGGGSGGGGSGGGGSQSVLTQPPSASGTPGQRVTISCTGSSSNIGAGYDVHWYQQLPGTAPKLLIYDNNKRPSGVPDRFSGSKSGTSASLAISGLRSXDEADYYCAAWDDSLSGWVFGGXTKLTVLGEQKLISEXXLSGSAA

SEQ ID NO: 109 - protein, 261 aa, Artificial Sequence
  MCP-4 (3) scFv antibody
  VARIANT 218: Any amino acid
  VARIANT 239: Any amino acid
  VARIANT 243: Any amino acid
  VARIANT 246: Any amino acid
  VARIANT 254..255: Any amino acids
EVQLLESGGGLVQPGGSLRLSCAASGFTFSSYGMHWVRQAPGKGLEWVSGISWNGGKTHYVDSVKGQFTISRDNSKNTLYLQMNSLRAEDTAVYYCARGGYSSGWAFDYWGQGTLVTVSSGGGGSGGGGSGGGGSQSVLTQPPSASGTPGQRVTISCSGRSSNIESNTVNWYQQLPGTAPKLLIYGNSNRPSGVPDRFSGSKSGTSASLAISGLRSEXEADYYCAAWDDRLNAVVFGGXTKLXVLXEQKLISEXXLSGSAA

SEQ ID NO: 110 - protein, 313 aa, Artificial Sequence
  Properdin scFv antibody
  VARIANT 222: Any amino acid
  VARIANT 228: Any amino acid
  VARIANT 244: Any amino acid
  VARIANT 247: Any amino acid
  VARIANT 262: Any amino acid
  VARIANT 273..274: Any amino acids
  VARIANT 287..288: Any amino acids
  VARIANT 290..294: Any amino acids
  VARIANT 298..300: Any amino acids
  VARIANT 302: Any amino acid
  VARIANT 304..309: Any amino acids
  VARIANT 313: Any amino acid
EVQLLESGGGLVQPGGSLRLSCAASGFTFSSNYMSWVRQAPGKGLEWVSAISGSGGSTYYADSVKGRFTISRDNSKNTLYLQMNSLRAEDTAVYYCAKGGSGWYDYFDYWGQGTLVTVSSGGGGSGGGGSGGGGSQSVLTQPPSASGTPGQRVTISCTGSSSNIGAGYDVHWYQQLPGTAPKLLIYRNNQRPSGVPDRFSGSKSGTSASLAISGLRSEDEAXYYCAAXDDGLNSPVFGGGTKLXVLXEQKLISEEDLSGSAXAHHHHHHSPRXXIRPIVSRITIHWXXFXXXXXGKTXXXPXLXXXXXXPPFX

SEQ ID NO: 111 - protein, 255 aa, Artificial Sequence
  TNF-beta (3) scFv antibody
  VARIANT 213: Any amino acid
  VARIANT 233: Any amino acid
  VARIANT 248: Any amino acid
EVQLLESGGGLVQPGGSLRLSCAASGFTFSDYYMSWIRQAPGKGLEWVSGLSGSAGRTHYADSVRGRFTISRDNSKNTLYLQMNSLRAEDTAMYYCASSLFDYWGQGTLVTVSSGGGGSGGGGSGGGGSQSVLTQPPSASGTPGQRVTISCSGSSSNIGSNYVYWYQQLPGTAPKLLIYSNNQRPSGVPDRFSGSKSGTSASLAISGLRSEDXADYYCAAWDDSLNAVVFGGXTKLTVLGEQKLISEXDLSGSAA

SEQ ID NO: 112 - protein, 262 aa, Artificial Sequence
  TNF-beta (4) scFv antibody
  VARIANT 240: Any amino acid
  VARIANT 254..256: Any amino acids
EVQLLESGGGLVQPGGSLRLSCAASGFTFSDYYMNWVRQAPGKGLEWVSGINWNSDDIDYVDSVKGRFTISRDNSKNTLYLQMNSLRAEDTAMYYCAIDSRYSSGWSFEYWGQGTLVTVSSGGGGSGGGGSGGGGSQSVLTQPPSASGTPGQRVTISCSGSTSNIGNSHVYWYQQLPGTAPKLLIYSNNQRPSGVPDRFSGSKSGTSASLAISGLRSEDEADYYCQSYDSSLSGVVFGGXTKLTVLGEQKLISXXXLSGSAA

SEQ ID NO: 113 - protein, 304 aa, Artificial Sequence
  VEGF (3) scFv antibody
  VARIANT 192: Any amino acid
  VARIANT 201: Any amino acid
  VARIANT 218: Any amino acid
  VARIANT 241: Any amino acid
  VARIANT 244: Any amino acid
  VARIANT 247: Any amino acid
  VARIANT 254..256: Any amino acids
  VARIANT 261: Any amino acid
  VARIANT 273: Any amino acid
  VARIANT 281: Any amino acid
  VARIANT 283: Any amino acid
  VARIANT 288: Any amino acid
  VARIANT 293..296: Any amino acids
  VARIANT 298..300: Any amino acids
  VARIANT 302: Any amino acid
  VARIANT 304: Any amino acid
EVQLLESGGGLVQPGGSLRLSCAASGFTFSSYEMNWVRQAPGKGLEWVSGISGSGGFTYYADSVKGRFTISRDNSKNTLYLQMNSLRAEDTAMYYCAREGYQDAFDIWGQGTLVTVSSGGGGSGGGGSGGGGSQSVLTQPPSASGTPGQRVTISCTGSSSNIGAGYDVHWYQQLPGTAPKLLIYSNNQRPSXVPDRFSGSXSGTSASLAISGLRSEDXADYYCAAWDDSLSGPPWVFGGGXKLXVLXEQKLISXXXLSGSXAAHHHHHHSPRXPIRPIVSXIXIHWPXFYNVXXXXTXXXPXLX

SEQ ID NO: 114 - protein, 261 aa, Artificial Sequence
  VEGF (4) scFv antibody
  VARIANT 30..32: Any amino acids
  VARIANT 34: Any amino acid
  VARIANT 50: Any amino acid
  VARIANT 54..55: Any amino acids
  VARIANT 97..104: Any amino acids
  VARIANT 193: Any amino acid
  VARIANT 202: Any amino acid
  VARIANT 219: Any amino acid
  VARIANT 232..233: Any amino acids
  VARIANT 239: Any amino acid
  VARIANT 253..255: Any amino acids
EVQLLESGGGLVQPGGSLRLSCAASGFTFXXXYXSWVRQAPGKGLEWVSXISWXXGSIGYADSVKGRFTISRDNSKNTLYLQMNSLRAEDTAVYYCXXXXXXXXNYFDYWGQGTLVTVSSGGGGSGGGGSGGGGSQSVLTQPPSASGTPGQRVTISCSGSNSNIGGNFVYWYQQLPGTAPKLLIYENSKRPSXVPDRFSGSXSGTSASLAISGLRSEDXADYYCAAWDDSLXXVVFGGXTKLTVLGEQKLISXXXLSGSAA

SEQ ID NO: 115 - protein, 260 aa, Artificial Sequence
  IL-4 (3) scFv antibody
  VARIANT 218: Any amino acid
  VARIANT 238..239: Any amino acids
  VARIANT 253: Any amino acid
EVQLLESGGGLVQPGGSLRLSCAASGFTFSNAWMSWVRQAPGKGLEWVSAISGSGGSTYYADSVKGRFTISRDNSKNTLYLQMNSLRAEDTAVYYCARAIAARPFDYWGQGTLVTVSSGGGGSGGGGSGGGGSQSVLTQPPSASGTPGQRVTISCTGATSNIGAGYDIHWYQQLPGTAPKLLIYSTNNRPSGVPDRFSGSKSGTSASLAISGLRSEDXADYYCAAWDDSLNGPVFGGXXKLTVLGEQKLISEXDLSGSAA

SEQ ID NO: 116 - protein, 216 aa, Artificial Sequence
  MUC-1 (1) scFv antibody
  VARIANT 3: Any amino acid
  VARIANT 200: Any amino acid
EVXLLESGGGLVQPGGSLRLSCAASGFTFSNYWMSWVRQAPGKGLEWVALISFDGSNKYYADSAKGRFTISRDNSKNTLYLQMNSLRAEDTAVYYCARVLAQQRMDVWGQGTLVTVSSGGGGSGGGGSGGGGSQSVLTQPPSASGTPGQRVTISCSGSSSNIGSNTVNWYQQLPGTAPKLLIYGNNNRPSGVPDRFSGSXSGTSASLAISGLRSED

SEQ ID NO: 117 - protein, 161 aa, Artificial Sequence
  CD40 (2) scFv antibody
EVQLLESGGGLVQPGGSLRLSCAASGFTFSAYWMHWVRQAPGKGLEWVSGISGGGGSTYYADSVKGRFTISRDNSKNTLYLQMNSLRAEDTAVYYCARMTPWYYGMDVWGQGTLVTVSSGGGGSGGGGSGGGGSQSMLTQPPSASGTPGQRVTISCSGSTS

SEQ ID NO: 118 - protein, 156 aa, Artificial Sequence
  CD40 (3) scFv antibody
  VARIANT 143..144: Any amino acids
EVQLLESGGGLVQPGGSLRLSCAASGFTFSTYGMHWVRQAPGKGLEWLSYISGGSSYIFYADSVRGRFTISRDNSENALYLQMNSLRAEDTAVYYCARILRGGSGMDLWGQGTLVTVSSGGGGSGGGGSGGGGSQSVLTQPPXXSGTPGQRVTISC

SEQ ID NO: 119 - protein, 256 aa, Artificial Sequence
  CD40 (4) scFv antibody
  VARIANT 219: Any amino acid
  VARIANT 232: Any amino acid
  VARIANT 239..240: Any amino acids
  VARIANT 246..247: Any amino acids
EVQLLESGGGLVQPGGSLRLSCAASGFTFSTYGMHWVRQAPGKGLEWLSYISGGSSYIFYADSVRGRFTISRDNSENALYLQMNSLRAEDTAVYYCARILRGGSGMDLWGQGTLVTVSSGGGGSGGGGSGGGGSQSVLTQPPSASGTPGQRVTISCTGSSSNIGAGYDVYWYQQLPGTAPKLLIYGNINRPSGVPDRFSGSKSGTSASLAISGLRSEDXADYYCAAWDDSLXGLVFGGXXKLTVLXXYKDDDDKAA

SEQ ID NO: 120 - protein, 267 aa, Artificial Sequence
  CT17 scFv antibody
  VARIANT 228: Any amino acid
  VARIANT 250: Any amino acid
  VARIANT 257: Any amino acid
  VARIANT 262: Any amino acid
  VARIANT 264: Any amino acid
EVQLLESGGGLVQPGGSLRLSCAASGFTFSSSAMHWVRQAPGKGLEWVSAISGSGGSTYYADSVKGRFTISRDNSKNTLYLQMNSLRAEDTAVYYCARVKGRVTIFGVVINSNYGMDVWGQGTLVTVSSGGGGSGGGGSGGGGSQSVLTQPPSASGTPGQRVTISCSGSISSIGSNAVSWYQQLPGTAPKLLIYGNSNRPSGVPDRFSGSKSGTSASLAISGLRSEDXADYYCAAWDDSLNGHDVVFGGXTKLTVLXDYKDXDXKAA

SEQ ID NO: 121 - protein, 265 aa, Artificial Sequence
  IgM (3) scFv antibody
  VARIANT 168: Any amino acid
  VARIANT 198: Any amino acid
  VARIANT 206..207: Any amino acids
  VARIANT 217: Any amino acid
  VARIANT 222: Any amino acid
  VARIANT 224: Any amino acid
  VARIANT 232..233: Any amino acids
  VARIANT 243: Any amino acid
  VARIANT 257..258: Any amino acids
EVQLLESGGGLVQPGGSLRLSCAASGFTFSSYAMSWVRQAPGKGLEWVSGISWNSGSIGYADSVKGRFTISRDNSKNTLYLQMNSLRAEDTAVYYCARGDYSSSPGGYYYYMDVWGQGTLVTVSSGGGGSGGGGSGGGGSQSVLTQPPSASGTPGQRVTISCSGSSSXIGSNTVNWYQQLPGTAPKLLIYGNSNRPSXVPDRFSGXXSGTSASLAIXGLRSXDXADYYCSSXXSTNTVIFGGXTKLTVLGEQKLISXXDLSGSAA

SEQ ID NO: 122 - protein, 262 aa, Artificial Sequence
  IgM (4) scFv antibody
  VARIANT 193: Any amino acid
  VARIANT 202: Any amino acid
  VARIANT 240: Any amino acid
  VARIANT 244: Any amino acid
  VARIANT 254..255: Any amino acids
EVQLLESGGGLVQPGGSLRLSCAASGFTFSSNEMSWIRQAPGKGLEWVSAIYSGGGTYYADSVKGRFTISRDNSKNTLYLQMNSLRAEDTAVYYCARVNDYGDNVYFDHWGQGTLVTVSSGGGGSGGGGSGGGGSQSVLTQPPSASGTPGQRVTISCSGSSSNIGNNYVSWYQQLPGTAPKLLIYENNKRPSXVPDRFSGSXSGTSASLAISGLRSEDEADYYCAAWDDSLSVYVVFGGXTKLXVLGEQKLISXXDLSGSAA

SEQ ID NO: 123 - protein, 261 aa, Artificial Sequence
  IgM (5) scFv antibody
  VARIANT 193: Any amino acid
  VARIANT 202: Any amino acid
  VARIANT 239: Any amino acid
  VARIANT 246: Any amino acid
  VARIANT 253: Any amino acid
  VARIANT 255: Any amino acid
EVQLLESGGGLVQPGGSLRLSCAASGFTFGSYEMNWVRQAPGKGLEWVSVIYSGGSTYYADSVEGRFTISRDNSKNTLYLQMNSLRAEDTAVYYCARDTNPYYYYGMDVWGQGTLVTVSSGGGGSGGGGSGGGGSQSVLTQPPSASGTPGQRVTISCSGSSSNIGNNAVNWYQQLPGTAPKLLIYRNNQRPSXVPDRFSGSXSGTSASLAISGLRSEDEADYYCQSYDSSLNGQVFGGXTKLTVLXEQKLISXEXLSGSAA

SEQ ID NO: 124 - protein, 259 aa, Artificial Sequence
  HLA-DR/DP scFv antibody
  VARIANT 190: Any amino acid
  VARIANT 199: Any amino acid
  VARIANT 216: Any amino acid
  VARIANT 237: Any amino acid
  VARIANT 244: Any amino acid
  VARIANT 251..252: Any amino acids
EVQLLESGGGLVQPGGSLRLSCAASGFTFSSYAMSWVRQAPGKGLEWVSAISGSGGSTYYADSVKGRFTISRDNSKNTLYLQMNSLRAEDTAVYYCARDGLLPLDYWGQGTLVTVSSGGGGSGGGGSGGGGSQSVLTQPPSASGTPGQRVTISCSGGSSNIGGNAVNWYQQLPGTAPKLLIYENNKRPSXVPDRFSGSXSGTSASLAISGLRSEDXADYYCSSYAVSNNFEVLFGGXTKLTVLXEQKLISXXDLSGSAA

SEQ ID NO: 125 - protein, 308 aa, Artificial Sequence
  ICAM-1 scFv antibody
  VARIANT 160: Any amino acid
  VARIANT 191: Any amino acid
  VARIANT 200: Any amino acid
  VARIANT 237: Any amino acid
  VARIANT 251..252: Any amino acids
  VARIANT 258: Any amino acid
  VARIANT 274: Any amino acid
  VARIANT 278..279: Any amino acids
  VARIANT 282..283: Any amino acids
  VARIANT 285: Any amino acid
  VARIANT 288: Any amino acid
  VARIANT 290..292: Any amino acids
  VARIANT 295..296: Any amino acids
  VARIANT 298: Any amino acid
  VARIANT 300: Any amino acid
  VARIANT 302..303: Any amino acids
  VARIANT 307..308: Any amino acids
EVQLLESGGGLVQPGGSLRLSCAASGFTFSNAWMSWVRQAPGKGLEWVAFIWYDGSNKYYADSVKGRFTISRDNSKNTLYLQMNSLRAEDTAVYYCARYSGWYFDYWGQGTLVTVSSGGGGSGGGGSGGGGSQSVLTQPPSASGTPGQRVTISCTGSSSXIGAGYDVHWYQQLPGTAPKLLIYDNNNRPSXVPDRFSGSXSGTSASLAISGLRSEDEADYYCQSYDSSLSAWLFGGXTKLTVLGEQKLISXXDLSGSXAAHHHHHHSPRWPIRXIVSXXTIXXPXFYXVXXXKPXXTXLXRXXAHPXX

SEQ ID NO: 126 - protein, 257 aa, Artificial Sequence
  IgM (2) scFv antibody
  VARIANT 189: Any amino acid
  VARIANT 198: Any amino acid
  VARIANT 235: Any amino acid
  VARIANT 251: Any amino acid
EVQLLESGGGLVQPGGSLRLSCAASGFTFSDYYMSWIRQAPGKGLEWVSAIGSGPYYAHSVRDRFTISRDNSKNTLYLQMNSLRAEDTAVYYCARGGVEASFDYWGQGTLVTVSSGGGGSGGGGSGGGGSQSVLTQPPSASGTPGQRVTISCTGSSSNIGAGYDVHWYQQLPGTAPKLLIYGNTNRPSXVPNRFSGSXSGTSASLAISGLRSEDEADYYCQSYDNDLSGWVFGGXTKLTVLGEQKLISEEXLSGSAA

SEQ ID NO: 127 - protein, 225 aa, Artificial Sequence
  MUC-1 (2) scFv antibody
  VARIANT 212: Any amino acid
EVQLLESGGGLVQPGGSLRLSCAASGFTFKNYWMSWVRQAPGKGLEWVSDISGGGGTTYIADSVKGRFTISRDNSKNTLYLQMNSLRAEDTAVYYCARIHSGSYYFDYWGQGTLVTVSSGGGGSGGGGSGGGGSQSVLTQPPSASGTPGQRVTISCTGSSSNIGAGYDVHWYQQLPGTAPKLLIYKNNQRPSGVPDRFSGSKSGTSASLAIXGLRSEDEADYYCA

SEQ ID NO: 128 - protein, 270 aa, Artificial Sequence
  MUC-1 (3) scFv antibody
  VARIANT 219: Any amino acid
  VARIANT 239..240: Any amino acids
  VARIANT 246: Any amino acid
  VARIANT 249: Any amino acid
  VARIANT 263: Any amino acid
  VARIANT 267..268: Any amino acids
EVQLLESGGGLVQPGGSLRLSCAASGFTFKNYWMSWVRQTPGKGLEWVSDISGGGGTTYIADSVKGRFTISRDNSKNTLYLQMNSLRAEDTAVYYCARIHSGSYYFDYWGQGTLVTVSSGGGGSGGGGSGGGGSQSVLTQPPSASGTPGQRVTISCTGSSSNIGAGYDVHWYQQLPGTAPKLLIYKNNQRPSGVPDRFSGSKSGTSASLAISGLRSEDXADYYCAAWDDSLNGPVFGGXXKLTVLXDYXDHDGDYKDHDIDYXDDDXXAA

SEQ ID NO: 129 - protein, 270 aa, Artificial Sequence
  MUC-1 (4) scFv antibody
  VARIANT 202: Any amino acid
  VARIANT 227: Any amino acid
  VARIANT 239: Any amino acid
  VARIANT 256: Any amino acid
  VARIANT 262..263: Any amino acids
  VARIANT 265: Any amino acid
  VARIANT 267: Any amino acid
EVQLLESGGGLVQPGGSLRLSCAASGFTFKNYWMSWVRQAPGKGLEWVSDISGGGGTTYIADSVKGRFTISRDNSKNTLYLQMNSLRAEDTAVYYCARIHSGSYYFDYWGQGTLVTVSSGGGGSVGGGSGGGGSQSVLTQPPSASGTSGQRVTISCTGSSSNIGAGYDVHWYQQLPGTAPKLLIYKNNQRPSGVPDRFSGSXSGTSASLAISGLRSEDEADYYCAAXDDSLNGPVFGGXTKLTVLGDYKDHDGDYXDHDIDXXDXDXKAA

SEQ ID NO: 130 - protein, 270 aa, Artificial Sequence
  MUC-1 (5) scFv antibody
  VARIANT 219: Any amino acid
  VARIANT 235: Any amino acid
  VARIANT 239: Any amino acid
  VARIANT 246: Any amino acid
  VARIANT 250: Any amino acid
  VARIANT 262: Any amino acid
EVQLLESGGGLVQPGGSLRLSCAASGFTFKNYWMSWVRQAPGKGLEWVSDISGGGGTTYIADSVKGRFTISRDNSKNTLYLQMNSLRAEDTAVYYCARIHSGSYYFDYWGQGTLVTVSSGGGGSGGGGSGGGGSQSVLTQPPSASGTPGQRVTISCTGSSSNIGADYDVHWYQQLPGTAPKLLIYKNNQRPSGVPDRFSGSKSGTSASLAISGLRSEDXADYYCAVWDDSLNGPXFGGXTKLTVLXDYKXHDGDYKDHDIDXKDDDDKAA

SEQ ID NO: 131 - protein, 270 aa, Artificial Sequence
  MUC-1 (6) scFv antibody
  VARIANT 239..240: Any amino acids
  VARIANT 246: Any amino acid
  VARIANT 249: Any amino acid
  VARIANT 264..265: Any amino acids
EVQLLESGGGLVQPGGSLRLSCAASGFTFKNYWMSWVRQAPGKGLEWVSDISGGGGTTYIADSVKGRFTISRDNSRNTLYLQMNSLRAEDTAVYYCARIHSGSYYFDYWGQGTLVTVSSGGGGSGGGGSGGGGSQSVLTQPPSASGTPGQKVTISCTGSSSNIGAGYDVHWYQQLPGTAPKLLIYKNNQRPSGVPDRFSGSRSGTSASLAISGLRSEDEADYYCAAWDDSLNGPVFGGXXKLTVLXDYXDHDGDYKDHDIDYKXXDDKAA

SEQ ID NO: 132 - protein, 112 aa, Artificial Sequence
  MCP-1 (4) scFv antibody
QSVLTQPPSASGTPGQRVTISCTGSSSNIGSDYGVQWYQQLPGTAPKLLIYSNNQRPSGVPDRFSGSKSGTSASLAISGLRSEDEADYYCAAWDDSLSGPVFGGGTKLTVLG

SEQ ID NO: 133 - protein, 112 aa, Artificial Sequence
  MCP-1 (5) scFv antibody
QSVLTQPASASGTPGQRVTISCTGNSSNIGAGYDVHWYQQLPGTAPKLLIYRNNQRPSGVPDRFSGSKSGTSASLAISGLLSEDEADYYCAAWDYSLNGWVFGGGTKLTVLG

SEQ ID NO: 134 - protein, 113 aa, Artificial Sequence
  MCP-1 (6) scFv antibody
QSVLTQPSSASGTPGQRVTISCTGNSSNIGAGYDVHWYQQLPGTAPNLLIYRNNQRPSGVPDRFSGSKSGTSASLAISGLRSEDEADYYCAAWDDSLNGWVFGGGTKLTVLGQ

SEQ ID NO: 135 - protein, 242 aa, Artificial Sequence
  MCP-1 (7) scFv antibody
  VARIANT 196: Any amino acid
  VARIANT 222: Any amino acid
  VARIANT 242: Any amino acid
EVQLLESGGGLVQPGGSLRLSCAASGFTFSSYAMSWVRQAPGKGLEWVAYINRGSTYTNYADSMKGRFTISRDNSKNTLYLQMNSLRAEDTAVYYCARRGYGSGSYYAFDIWGQGTLVTVSSGGGGSGGGGSGGGGSQSVLTQPPSASGTPGQRVTISCTGSSSNIGSDYGVQWYQQLPGTAPKLLIYSNNQRPSXVPDRFSGSKSGTSASLAISGLRSEDXADYYCAAWDDSLSGPVFGGX

SEQ ID NO: 136 - protein, 240 aa, Artificial Sequence
  MCP-1 (8) scFv antibody
  VARIANT 195: Any amino acid
  VARIANT 204: Any amino acid
  VARIANT 221: Any amino acid
EVQLLESGGGLVQPGGSLRLSCAASGFTFGDYAMSWVRQAPGKGLEWVAVISYDGSNKYYADSVKGRFTISRDNSKNTLYLQMNSLRAEDTAVYYCARDPDPSGTDAFDFWGQGTLVTVSSGGGGSGGGGSGGGGSQSVLTQPPSASGTPGQRVTISCSGSSSNIGAGYDVHWYQQLPGTAPKLLIYGNSNRPSXVPDRFSGSXSGTSASLAISGLRSEDXADYYCAAWDDSLSAWAFGG

SEQ ID NO: 137 - protein, 237 aa, Artificial Sequence
  MCP-1 (9) scFv antibody
  VARIANT 192..193: Any amino acids
  VARIANT 202: Any amino acid
EVQLLESGGGLVQPGGSLRLSCAASGFTFSSYEMNWVRQAPGKGLEWVSAISGPGGSTYYADSVKGRFTISRDNSKNTLYLQMNSLRAEDTAVYYCARDLSDYGDFDYWGQGTLVTVSSGGGGSGGGGSGGGGSQSVLTQPPSASGTPGQRVTISCTGSSSNIGAGYDAHWYQQLPGTAPKLLIYDNNKRPXXVPDRFSGSXSGTSASLAISGLRSEDEADYYCATWDDSLRGWVFG

SEQ ID NO: 138 - protein, 268 aa, Artificial Sequence
  Cystatin C (1) scFv antibody
  VARIANT 191: Any amino acid
  VARIANT 200: Any amino acid
  VARIANT 237: Any amino acid
  VARIANT 247: Any amino acid
  VARIANT 254: Any amino acid
  VARIANT 260..261: Any amino acids
EVQLLESGGGLVQPGGSLRLSCAASGFTFSSYAMNWVRQAPGKGLEWVGLISYDGRTTYYADSVKGRSTISRDNSKNTLYLQMNSLRAEDTAVYYCATTTGTTLDYWGQGTLVTVSSGGGGSGGGGSGGGGSQSVLTQPPSASGTPGQRVTISCTGSSSNIGAGYDVHWYQQLPGTAPKLLIYGNTNRPSXVPDRFSGSXSGTSASLAISGLRSEDEADYYCAAWDDSLYGWVFGGXTKLTVLGDYXDHDGDYXDHDIDXXDDDDKAA

SEQ ID NO: 139 - protein, 192 aa, Artificial Sequence
  Cystatin C (2) scFv antibody
EVQLLESGGGLVQPGGSLRLSCAASGFTFSSYSMNWVRQAPGKGLEWVAFISYDGSNKYYVDSVKGRFTISRDNSKNTLYLQMNSLRAEDTAVYYCARDGVPAVPFDYWGQGTLVTVSSGGGGSGGGGSGGGGSQSVLTQPPSASGTPGQRVTISCSGSSSNIGAGYDVHWYQQLPGTAPKLLIYSNNQRPS

SEQ ID NO: 140 - protein, 196 aa, Artificial Sequence
  Cystatin C (3) scFv antibody
  VARIANT 167: Any amino acid
EVQLLESGGGLVQPGGSLRLSCAASGFTFSNYAMTWVRQAPGKGLEWVADISHDGFHKYYADSVRGRFTISRDNSKNTLYLQMNSLRAEDTAVYYCARYGRVLPYYYYYGMDVWGQGTLVTVSSGGGGSGGGGSGGGGSQSVLTQPPSASGTPRQRVTISCTGSSSXIGAGYDVHWYQQLPGTAPKLLIYGNSNRP

SEQ ID NO: 141 - protein, 236 aa, Artificial Sequence
  Cystatin C (4) scFv antibody
  VARIANT 191: Any amino acid
  VARIANT 200: Any amino acid
  VARIANT 205: Any amino acid
  VARIANT 215: Any amino acid
EVQLLESGGGLVQPGGSLRLSCAASGFTFSSYAMNWVRQAPGKGLEWVGLISYDGRTTYYADSVKGRSTISRDNSKNTLYLQMNSLRAEDTAVYYCATTTGTTLDYWGQGTLVTVSSGGGGSGGGGSGGGGSQSVLTQPPSASGTPGQRVTISCTGSSSNIGAGYDVHWYQQLPGTAPKLLIYGNTNRPSXVPDRFSGSXSGTSXSLAISGLRSXDEADYYCAAWDDSLYGWVFGG

SEQ ID NO: 142 - protein, 187 aa, Artificial Sequence
  Apo-A1 (1) scFv antibody
EVQLLESGGGLVQPGGSLRLSCAASGFTFSNNGMHWVRQAPGKGLEWVSAISASGGSTYYADSVKGRFTISRDNSKNTLYLQMNSLRAEDTAVYYCATHGGSSYDAFDIWGQGTLVTVSSGGGGSGGGGSGGGGSQSVLTQPPSASGTPGQRVTISCTGSSSNIGAGYVVHWYQQLPGTAPKLLIYG

SEQ ID NO: 143 - protein, 196 aa, Artificial Sequence
  Apo-A1 (2) scFv antibody
  VARIANT 166: Any amino acid
EVQLLESGGGLVQPGGSLRLSCAASGFTFRDYYMSWIRQAPGKGLEWVAVTSYDGSKKYYADSVKGRFTISRDNSKNTLYLQMNSLRAEDTAVYYCAKDYADDSIAAPAFDIWGQGTLVTVSSGGGGSGGGGSGGGGSQSVLTQPPSASGTPGQRVTISCTGSSSXIGAGYDVHWYQQLPGTAPKLLIYGNSNRPS

SEQ ID NO: 144 - protein, 315 aa, Artificial Sequence
  Apo-A1 (3) scFv antibody
  VARIANT 3..4: Any amino acids
  VARIANT 221: Any amino acid
  VARIANT 225: Any amino acid
  VARIANT 249..250: Any amino acids
  VARIANT 252: Any amino acid
  VARIANT 266: Any amino acid
  VARIANT 269..271: Any amino acids
  VARIANT 273: Any amino acid
  VARIANT 283..285: Any amino acids
  VARIANT 288..290: Any amino acids
  VARIANT 292..293: Any amino acids
  VARIANT 297..304: Any amino acids
  VARIANT 307..315: Any amino acids
EVXXLESGGGLVQPGGSLRLSCAASGFTFRDYYMSWIRQAPGKGLEWVAVTSYDGSKKYYADSVKGRFTISRDNSKNTLYLQMNSLRAEDTAVYYCAKDYADDSIAAPAFDIWGQGTLVTVSSGGGGSGGGGSGGGGSQSVLTQPPSASGTPGQRVTISCTGSSSNIGAGYDVHWYQQLPGTAPKLLIYGNSNRPSGVPDRFSGSKSGTSASLAISGLRSXDEAXYYCQSYDSSLSVVFGGGTKLTVLXXYXDHDGDYKDHDIDYXDDXXXAXAHHHHHHSPXXXIRXXXSXXTIHXXXXXXXXDWXXXXXXXXX

SEQ ID NO: 145 - protein, 271 aa, Artificial Sequence
  Factor B (2) scFv antibody
  VARIANT 240: Any amino acid
  VARIANT 250: Any amino acid
  VARIANT 263: Any amino acid
  VARIANT 268: Any amino acid
EVQLLESGGGLVQPGGSLRLSCAASGFTFSSYSMNWVRQAPGKGLEWVAVISYDGRFIYYSDSVKGRFTISRDNSKNTLYLQMNSLRAEDTAVYYCARSYGGNLAMDVWGQGTLVTVSSGGGGSGGGGSGGGGSQSVLTQPPSASGTPGQRVTISCTGSSSNIGAGYDVHWYQQLPGTAPKLLIYDNNKRPSGVPDRFSGSNSGTSASLAISGLRSEDEADYYCAAWDDRLNGRVVFGGXTKLTVLGDYXDHDGDYKDHDIDXKDDDXKAA

SEQ ID NO: 146 - protein, 226 aa, Artificial Sequence
  Factor B (3) scFv antibody
  VARIANT 160: Any amino acid
  VARIANT 190: Any amino acid
  VARIANT 199: Any amino acid
  VARIANT 209: Any amino acid
  VARIANT 216: Any amino acid
EVQLLESGGGLVQPGGSLRLSCAASGFTFSSYSMNWVRQAPGKGLEWVAVISYDGSNQYYADSVRGRFTISKDNSKNTLYLQMNSLRAEDTAVYYCAREWHYSLDVWGQGTLVTVSSGGGGSGGGGSGGGGSQSVLTQPPSASGTPGQRVTISCSGSSSXIGSNTVNWYQQLPGTAPKLLIYRNNQRPSXVPDRFSGSXSGTSASLAIXGLRSEDXADYYCAAWDD

SEQ ID NO: 147 - protein, 323 aa, Artificial Sequence
  Factor B (4) scFv antibody
  VARIANT 191..192: Any amino acids
  VARIANT 201: Any amino acid
  VARIANT 206: Any amino acid
  VARIANT 227: Any amino acid
  VARIANT 229: Any amino acid
  VARIANT 238: Any amino acid
  VARIANT 240: Any amino acid
  VARIANT 245: Any amino acid
  VARIANT 247..248: Any amino acids
  VARIANT 252..253: Any amino acids
  VARIANT 260: Any amino acid
  VARIANT 262: Any amino acid
  VARIANT 264: Any amino acid
  VARIANT 266..269: Any amino acids
  VARIANT 288: Any amino acid
  VARIANT 290: Any amino acid
  VARIANT 292: Any amino acid
  VARIANT 294..295: Any amino acids
  VARIANT 298: Any amino acid
  VARIANT 300..303: Any amino acids
  VARIANT 305..316: Any amino acids
  VARIANT 318..323: Any amino acids
EVQLLESGGGLVQPGGSLRLSCAASGFTFSKHSMNWVRQAPGKGLEWVATVSYDGNYKYYADSVKGRFTISRDNSKNTLYLQMNSLRAEDTAVYYCAREGYYYYGMDVWGQGTLVTVSSGGGGSGGGGSGGGGSQSVLTQPPSASGTPGQRVTISCTGSSSNIGNNAVNWYQQLPGTAPKLLIYNNNQRPXXVPDRFSGSXSGTSXSLAISGLRSEDEADYYCQPYXDXLSSVVFGGXTXLTVLXDXXDHDXXYKDHDIXYXDXDXXXXAHHHHHHSPRWPIRPIVSXIXIXWXXVLXRXXXXNXXXXXXXXXXXXHXXXXXX

SEQ ID NO: 148 - protein, 272 aa, Artificial Sequence
  C1 inh. (2) scFv antibody
  VARIANT 203: Any amino acid
  VARIANT 241: Any amino acid
  VARIANT 248: Any amino acid
  VARIANT 251: Any amino acid
  VARIANT 264..265: Any amino acids
  VARIANT 270: Any amino acid
EVQLLESGGGLVQPGGSLRLSCAASGFTFSNAWMSWVRQAPGKGLEWVSAISGSGGSTYYADSVKGRFTISRDNSKNTLYLQMNSLRAEDTAVYYCARNRGNWGTYYFDYWGQGTLVTVSSGGGGSGGGGSGGGGSQSVLTQPPSASGTPGQRVTISCSGSSSNIGSNYVSWYQQLPGTAPKLLIYGSSNRPSGVPDRFSGSXSGTSASLAISGLRSEDEADYYCQSYDSSLSDHVVFGGXTKLTVLXDYXDHDGDYKDHDIDXXDDDDXAA

SEQ ID NO: 149 - protein, 272 aa, Artificial Sequence
  C1 inh. (3) scFv antibody
  VARIANT 164: Any amino acid
  VARIANT 194: Any amino acid
  VARIANT 203: Any amino acid
  VARIANT 220: Any amino acid
  VARIANT 241: Any amino acid
  VARIANT 251: Any amino acid
  VARIANT 262: Any amino acid
  VARIANT 264..265: Any amino acids
  VARIANT 268..270: Any amino acids
EVQLLESGGGLVQPGGSLRLSCAASGFTFSNAWMSWVRQAPGKGLEWVSAISGSGGSTYYADSVKGRFTISRDNSKNTLYLQMNSLRAEDTAVYYCARNRGNWGTYYFDYWGQGTLVTVSSGGGGSGGGGSGGGGSQSVLTQPPSASGTPGQRVTISCSGSSSXIGSNYVSWYQQLPGTAPKLLIYGSSNRPSXVPDRFSGSXSGTSASLAISGLRSEDXADYYCQSYDSSLSDHVVFGGXTKLTVLGDYXDHDGDYKDHDXDXXDDXXXAA

SEQ ID NO: 150 - protein, 247 aa, Artificial Sequence
  C1 inh. (4) scFv antibody
  VARIANT 164: Any amino acid
  VARIANT 194: Any amino acid
  VARIANT 202..203: Any amino acids
  VARIANT 234: Any amino acid
  VARIANT 241: Any amino acid
EVQLLESGGGLVQPGGSLRLSCAASGFTFSNAWMSWVRQAPGKGLEWVSAISGSGGSTYYADSVKGRFTISRDNSKNTLYLQMNSLRAEDTAVYYCARNRGNWGTYYFDYWGQGTLVTVSSGGGGSGGGGSGGGGSQSVLTQPPSASGTPGQRVTISCSGSSSXIGSNYVSWYQQLPGTAPKLLIYGSSNRPSXVPDRFSGXXSGTSASLAISGLRSEDEADYYCQSYDSSLSXHVVFGGXTKLTVL

SEQ ID NO: 151 - protein, 263 aa, Artificial Sequence
  C5 (3) scFv antibody
  VARIANT 210: Any amino acid
  VARIANT 232: Any amino acid
  VARIANT 239: Any amino acid
  VARIANT 243: Any amino acid
  VARIANT 255: Any amino acid
  VARIANT 260..261: Any amino acids
EVQLLESGGGLVQPGGSLRLSCAASGFTFSSYGMHWVRQAPGKGLEWVSYISSSGSTIYYADSVKGRFTISRDNSKNTLYLQMNSLRAEDTAVYYCLTLGGYWGQGTLVTVSSGGGGSGGGGSGGGGSQSVLTQPPSASGTPGQRVTISCSGSSSNIGSNTVNWYQQLPGTAPKLLIYSNNQRPSGVPDRFSGSKSGTSASLAISGLRSXDEADYYCQSYDSSLSGWVFGGXTKLTVLXDYKXHDGDYKDHDIDXKDDDXXAA

SEQ ID NO: 152 - protein, 291 aa, Artificial Sequence
  C4 (2) scFv antibody
  VARIANT 207: Any amino acid
  VARIANT 212: Any amino acid
  VARIANT 224: Any amino acid
  VARIANT 237: Any amino acid
  VARIANT 244..246: Any amino acids
  VARIANT 249: Any amino acid
  VARIANT 254..256: Any amino acids
  VARIANT 261..266: Any amino acids
  VARIANT 271..275: Any amino acids
  VARIANT 277: Any amino acid
  VARIANT 279: Any amino acid
  VARIANT 281..283: Any amino acids
  VARIANT 289..290: Any amino acids
EVQLLESGGGLVQPGGSLRLSCAASGFTFSDYYMSWVRQAPGKGLEWVSGVSWNGSRTHYADSVKGRFTISRDNSKNTLYLQMNSLRAEDTAVYYCAGYGSGSRATGYNWFAPWGQGTLVTVSSGGGGSGGGGSGGGGSQSVLTQPPSASGTPGQRVTISCTGSSSNIGAGYDVHWYQQLPGTAPKLLIYRNNQRPSGVPDRFSGSXSGTSXSLAISGLRSEDXADYYCQSYDSSLXGPYWVFXXXNQXDGPRXXXKTMTXXXXXXDIDYXXXXXQXRXAXXXHHHSPXXP

SEQ ID NO: 153 - protein, 303 aa, Artificial Sequence
  C4 (3) scFv antibody
  VARIANT 161: Any amino acid
  VARIANT 184: Any amino acid
  VARIANT 191: Any amino acid
  VARIANT 200: Any amino acid
  VARIANT 210: Any amino acid
  VARIANT 237: Any amino acid
  VARIANT 247: Any amino acid
  VARIANT 254: Any amino acid
  VARIANT 260..261: Any amino acids
  VARIANT 265: Any amino acid
  VARIANT 268: Any amino acid
  VARIANT 276..277: Any amino acids
  VARIANT 284: Any amino acid
  VARIANT 287..288: Any amino acids
  VARIANT 292..294: Any amino acids
  VARIANT 296..301: Any amino acids
EVQLLESGGGLVQPGGSLRLSCAASGFTFSSYAMSWVRQAPGKGLEWVSAISGSGGSTYYADSVKGRFTISRDNSKNTLYLQMNSLRAEDTAVYYCARGWSTSSFDYWGQGTLVTVSSGGGGSGGGGSGGGGSQSVLTQPPSASGTPGQRVTISCSGSSSXIGNHYVSWYQQLPGTATKLLIYXDDLLPSXVPDRFSGSXSGTSASLAIXGLRSEDEADYYCAAWDDRSGQVLFGGXTKLTVLGDYXDHDGDYXDHDIDXXDDDXKAXAHHHHHHXXRWPIRPXVSXXTIHXXXFXXXXXXKT

SEQ ID NO: 154 - protein, 317 aa, Artificial Sequence
  C4 (4) scFv antibody
  VARIANT 160: Any amino acid
  VARIANT 198..199: Any amino acids
  VARIANT 236: Any amino acid
  VARIANT 240: Any amino acid
  VARIANT 246: Any amino acid
  VARIANT 248..249: Any amino acids
  VARIANT 259: Any amino acid
  VARIANT 262..265: Any amino acids
  VARIANT 267: Any amino acid
  VARIANT 270: Any amino acid
  VARIANT 277: Any amino acid
  VARIANT 279..280: Any amino acids
  VARIANT 285..286: Any amino acids
  VARIANT 289..292: Any amino acids
  VARIANT 294: Any amino acid
  VARIANT 298: Any amino acid
  VARIANT 301..302: Any amino acids
  VARIANT 304: Any amino acid
  VARIANT 306..315: Any amino acids
  VARIANT 317: Any amino acid
EVQLLESGGGLVQPGGSLRLSCAASGFTFSSYSMNWVRQAPGKGLEWVSGISGSGGSTYYADSVKGRFTISRDNSKNTLYLQMNSLRAEDTAVYYCAKHSGYGFDIWGQGTLVTVSSGGGGSGGGGSGGGGSQSVLTQPPSASGTPGQRVTISCSGGASXLGMHFVSWYQQLPGTAPKLLIYYDDLLPSGVPDRFSGXXSGTSASLAISGLRSEDEADYYCAAWDDSLNGWVFGGXTKLXVLGDYXDXXGDYKDHDIDXKDXXXXAXAHXHHHHSPXWXXRPIVXXITXXXXVXLQRXDWXXPXVXXXXXXXXXXPX

SEQ ID NO: 155 - protein, 275 aa, Artificial Sequence
  C3 (3) scFv antibody
  VARIANT 199: Any amino acid
  VARIANT 208: Any amino acid
  VARIANT 223: Any amino acid
  VARIANT 225: Any amino acid
  VARIANT 244: Any amino acid
  VARIANT 254: Any amino acid
  VARIANT 268: Any amino acid
  VARIANT 270: Any amino acid
  VARIANT 272..273: Any amino acids
EVQLLESGGGLVQPGGSLRLSCAASGFTFSSYAMNWVRQAPGKGLEWVANINQDGSTKFYVDSVKGRFTISRDNSKNTLYLQMNSLRAEDTAVYYCARDTGGNYLGGYYYYGMDVWGQGTLVTVSSGGGGSGGGGSGGGGSQSVLTQPPSASGTPGQRVTISCSGSSSNIGSNYVYWYQQLPGTAPKLLIYRNDQRPSXVPDRFSGSXSGTSASLAISGLRSXDXADYYCSSYAGNNNLVFGGXTKLTVLGDYXDHDGDYKDHDIDYXDXDXXAA

SEQ ID NO: 156 - protein, 273 aa, Artificial Sequence
  C3 (4) scFv antibody
  VARIANT 220: Any amino acid
  VARIANT 242: Any amino acid
  VARIANT 250: Any amino acid
  VARIANT 252: Any amino acid
  VARIANT 261: Any amino acid
  VARIANT 269..270: Any amino acids
EVQLLESGGGLVQPGGSLRLSCAASGFTFSDHYMDWVRQAPGKGLEWVSGISGNGATIDYADSVKGRFTISRDNSKNTLYLQMNSLRAEDTAVYYCARPSITAAGSEDAFDLWGQGTLVTVSSGGGGSGGGGSGGGGSQSVLTQPPSASGTPGQRVTISCSGSSSNIGSNYVYWYQQLPGTAPKLLIYGNSNRPSGVPDRFSGSKSGTSASLAISGLRSXDGADYYCQSYDSSLSGWVFGGXTKLTVLGXYXDHDGDYKDXDIDYKDDXXKAA

SEQ ID NO: 157 - protein, 247 aa, Artificial Sequence
  C3 (5) scFv antibody
  VARIANT 195: Any amino acid
  VARIANT 204: Any amino acid
  VARIANT 214: Any amino acid
  VARIANT 221: Any amino acid
  VARIANT 234: Any amino acid
  VARIANT 239: Any amino acid
  VARIANT 241: Any amino acid
EVQLLESGGGLVQPGGSLRLSCAASGFTFSNYWMSWVRQAPGKGLEWVSGISGSGGTTYYADFVKGRFTISRDNSKNTLYLQMNSLRAEDTAVYYCARKYYYGSSGAFDIWGQGTLVTVSSGGGGSGGGGSGGGGSQSVLTQPPSASGTPGQRVTISCTGSSSNIGAGYDVHWYQQLPGTAPKLLIYRNNQRPSXVPDRFSGSXSGTSASLAIXGLRSEDXADYYCAAWDDSLXGPVFXGXTKLTVL

SEQ ID NO: 158 - protein, 275 aa, Artificial Sequence
  C3 (6) scFv antibody
  VARIANT 208: Any amino acid
  VARIANT 225: Any amino acid
  VARIANT 244..245: Any amino acids
  VARIANT 252..254: Any amino acids
  VARIANT 267..268: Any amino acids
  VARIANT 270: Any amino acid
  VARIANT 272..273: Any amino acids
EVQLLESGGGLVQPGGSLRLSCAASGFTFSSYAMNWVRQAPGKGLEWVANINQDGSTKFYVDSVKGRFTISRDNSKNTLYLQMNSLRAEDTAVYYCARDTGGNYLGGYYYYGMDVWGQGTLVTVSSGGGGSGGGGSGGGGSQSVLTQPPSASGTPGQRVTISCSGSSSNIGSNYVYWYQQLPGTAPKLLIYRNDQRPSGVPDRFSGSXSGTSASLAISGLRSEDXADYYCSSYAGNNNLVFGGXXKLTVLGXXXDHDGDYKDHDIDXXDXDXXAA

SEQ ID NO: 159 - protein, 220 aa, Artificial Sequence
  MYOM2 (1) scFv antibody
  VARIANT 158: Any amino acid
  VARIANT 188: Any amino acid
  VARIANT 196..197: Any amino acids
  VARIANT 202: Any amino acid
  VARIANT 207: Any amino acid
EVQLLESGGGLVQPGGSLRLSCAASGFTFSSYAMSWVRQAPGKGLEWVSGISGSGGSTYYADSVKGRFTISRDNSKNTLYLQMNSLRAEDTAVYYCARGVVAGSWGQGTLVTVSSGGGGSGGGGSGGGGSQSVLTQPPSASGTPGQRVTISCSGSSSXIGNNAVNWYQQLPGTAPKLLIYDNNKRPSXVPDRFSGXXSGTSXSLAIXGLRSEDEADYYCA

SEQ ID NO: 160 - protein, 246 aa, Artificial Sequence
  MYOM2 (2) scFv antibody
  VARIANT 192: Any amino acid
  VARIANT 201: Any amino acid
  VARIANT 218: Any amino acid
  VARIANT 238: Any amino acid
EVQLLESGGGLVQPGGSLRLSCAASGFTFSNEWMAWVRQAPGKGLEWVSSISSSSSYIYYADSVKGRFTISRDNSKNTLYLQMNSLRAEDTAVYYCAGTYHDFWSATYWGQGTLVTVSSGGGGSGGGGSGGGGSQSVLTQPPSASGTPGQRVTISCSGSSSNIGSNTVNWYQQLPGTAPKLLIYGNSNRPSXVPDRFSGSXSGTSASLAISGLRSEDXADYYCAAWDDSLNGWVFGGXTKLTVLGD

SEQ ID NO: 161 - protein, 271 aa, Artificial Sequence
  LUM scFv antibody
  VARIANT 203: Any amino acid
  VARIANT 240: Any amino acid
  VARIANT 247: Any amino acid
  VARIANT 250: Any amino acid
  VARIANT 263..265: Any amino acids
  VARIANT 268..269: Any amino acids
EVQLLESGGGLVQPGGSLRLSCAASGFTFSSNYMSWVRQAPGKGLEWVSAISASGTYTYYTDSVNGRFTISRDNSKNTLYLQMNSLRAEDTAVYYCARVNTVGLGTPFDNWGQGTLVTVSSGGGGSGGGGSGGGGSQSVLTQPPSASGTPGQRVTISCSGSSSNIGSNTVNWYQQLPGTAPKLLIYGNRNRPSGVPDRFSGSXSGTSASLAISGLRSEDEADYYCAAWDDSLSGWVFGGXTKLTVLXDYXDHDGDYKDHDIDXXXDDXXAA

SEQ ID NO: 162 - protein, 266 aa, Artificial Sequence
  DUSP9 scFv antibody
  VARIANT 197: Any amino acid
  VARIANT 235: Any amino acid
  VARIANT 245: Any amino acid
  VARIANT 263: Any amino acid
EVQLLESGGGLVQPGGSLRLSCAASGFTFSSYGFHWVRQAPGKGLEWVAVISYDGSNKYYADSVKGRFTISRDNSKNTLYLQMNSLRAEDTAVYYCARGEFGVYWGQGTLVTVSSGGGGSGGGGSGGGGSQSVLTQPPSASGTPGQRVTISCSGSSSNIGSNYVYWYQQLPGTAPKLLIYGNRNRPSGVPDRFSGSXSGTSASLAISGLRSEDEADYYCSSYAGSNNFEVVFGGXTKLTVLGDYXDHDGDYKDHDIDYKDDDXKAA

SEQ ID NO: 163 - protein, 237 aa, Artificial Sequence
  CHX10 (1) scFv antibody
  VARIANT 191: Any amino acid
  VARIANT 200: Any amino acid
EVQLLESGGGLVQPGGSLRLSCAASGFTFSSYGMHWVRQAPGKGLEWVAVISYDGSNKYYADSVKGRFTISRDNSKNTLYLQMNSLRAEDTAVYYCARNSDYYGMDVWGQGTLVTVSSGGGGSGGGGSGGGGSQSVLTQPPSASGTPGQRVTISCSGSSSNIGYSDVYWYQQLPGTAPKLLIYENNKRPSXVPDRFSGSXSGTSASLAISGLRSEDEADYYCSTWDDSLNGHVIFGG

SEQ ID NO: 164 - protein, 232 aa, Artificial Sequence
  CHX10 (3) scFv antibody
  VARIANT 163: Any amino acid
  VARIANT 193: Any amino acid
  VARIANT 201..202: Any amino acids
  VARIANT 207: Any amino acid
  VARIANT 219: Any amino acid
  VARIANT 226: Any amino acid
EVQLLESGGGLVQPGGSLRLSCAASGFTFSSYAMSWVRQAPGKGLEWVAVISYDGSNKYYADSVKGRFTISRDNSKNTLYLQMNSLRAEDTAVYYCARNYGDSINWFDPWGQGTLVTVSSGGGGSGGGGSGGGGSQSVLTQPPSASGTPGQRVTISCSGSSSXIRSNTVNWYQQLPGTAPKLLIYGNSNRPSXVPDRFSGXXSGTSXSLAISGLRSEDXADYYCAXWDDSLN

SEQ ID NO: 165 - protein, 236 aa, Artificial Sequence
  ATP-5B (1) scFv antibody
  VARIANT 161: Any amino acid
  VARIANT 191: Any amino acid
  VARIANT 199..200: Any amino acids
  VARIANT 217: Any amino acid
EVQLLESGGGLVQPGGSLRLSCAASGFTFSSYAMHWVRQAPGKGLEWVAVISYDGSKTYHADSVEGRFTISRDNSKNTLYLQMNSLRAEDTAVYYCARHLRPYYFDYWGQGTLVTVSSGGGGSGGGGSGGGGSQSVLTQPPSASGTPGQRVTISCSGSSSXIGSNTVNWYQQLPGTAPKLLIYGNSNRPSXVPDRFSGXXSGTSASLAISGLRSEDXADYYCSAWDDRLRGRVFGG

SEQ ID NO: 166 - protein, 324 aa, Artificial Sequence
  ATP-5B (2) scFv antibody
  VARIANT 201: Any amino acid
  VARIANT 207: Any amino acid
  VARIANT 212: Any amino acid
  VARIANT 244: Any amino acid
  VARIANT 254..255: Any amino acids
  VARIANT 258..259: Any amino acids
  VARIANT 268..269: Any amino acids
  VARIANT 271: Any amino acid
  VARIANT 273: Any amino acid
  VARIANT 275: Any amino acid
  VARIANT 278: Any amino acid
  VARIANT 286..289: Any amino acids
  VARIANT 294..307: Any amino acids
  VARIANT 309: Any amino acid
  VARIANT 311..314: Any amino acids
  VARIANT 317..324: Any amino acids
EVQLLESGGGLVQPGGSLRLSCAASGFTFSSYGMHWVRQAPGKGLEWVSLISSASSYIYHADSVKGRFTISRDNSKNTLYLQMNSLRAEDTAVYYCARAGRVCTNGVCHTTFDYWGQGTLVTVSSGGGGSGGGGSGGGGSQSVLTQPPSASGTPGQRVTISCSGDRSNIGSNTVNWYQQLPGTAPKLLIYGNSNRPSGVPXRFSGSXSGTSXSLAISGLRSEDEADYYCQSYDSSLSAVVFGGXTKLTVLGDYXXHDXXYKDHDIDYXXDXDXAXAHXHHHHSPRXXXXPIVSXXXXXXXXXXXXXXLXKXXXXPTXXXXXXXX

SEQ ID NO: 167 - protein, 269 aa, Artificial Sequence
  ATP-5B (3) scFv antibody
  VARIANT 192: Any amino acid
  VARIANT 201: Any amino acid
  VARIANT 218: Any amino acid
  VARIANT 238: Any amino acid
  VARIANT 242: Any amino acid
  VARIANT 245: Any amino acid
  VARIANT 248: Any amino acid
  VARIANT 255: Any amino acid
  VARIANT 261..263: Any amino acids
EVQLLESGGGLVQPGGSLRLSCAASGFTFSTYAMSWVRQAPGKGLEWVSSISSTSTYIHYADSVKGRFTISRDNSKNTLYLQMNSLRAEDTAVYYCARVSSWYSAFDIWGQGTLVTVSSGGGGSGGGGSGGGGSQSVLTQPPSASGTPGQRVTISCTGSSSNIGNNAVNWYQQLPGTAPKLLIYSNNQRPSXVPDRFSGSXSGTSASLAISGLRSEDXADYYCQSYDSSLSGVIFGGXTKLXVLXDYXDHDGDYXDHDIDXXXDDDKAA

SEQ ID NO: 168 - protein, 267 aa, Artificial Sequence
  Sox11a scFv antibody
  VARIANT 203: Any amino acid
  VARIANT 220: Any amino acid
  VARIANT 227: Any amino acid
  VARIANT 236: Any amino acid
  VARIANT 243: Any amino acid
  VARIANT 246: Any amino acid
  VARIANT 252..253: Any amino acids
  VARIANT 259: Any amino acid
  VARIANT 262: Any amino acid
  VARIANT 264: Any amino acid
EVQLLESGGGLVQPGGSLRLSCAASGFTFSDFWMSWVRQAPGKGLEWVSSISGGGGTAFYVDSVKGRFTISRDNSKNTLYLQMNSLRAEDTALYYCARMTDLESGDAFDIWGQGTLVTVSSGGGGSGGGGSGGGGSQSVLTQPPSASGTPGQRVTISCSGSSSNIGSNYVNWYQQLPGTAPKLLIYNDNVRPSGVPDRFSGSXSGTSASLAISGLRSEDXADYYCQXWGTGVFGGXTKLTVLXDYXDHDGDXXDHDIDXKDXDXKAA

SEQ ID NO: 169 - protein, 247 aa, Artificial Sequence
  TBC1D9 (1) scFv antibody
  VARIANT 192..193: Any amino acids
  VARIANT 201..202: Any amino acids
  VARIANT 239: Any amino acid
EVQLLESGGGLVQPGGSLRLSCAASGFTFSSYSMSWVRQAPGKGLEWVAVISYDGSNKYYADSVKGRFTISRDNSKNTLYLQMNSLRAEDTAVYYCARDRTRGSTALDIWGQGTLVTVSSGGGGSGGGGSGGGGSQSVLTQPPSASGTPGQRVTISCSGSSSYIGSNYVYWYQQLPGTAPKLLIYRNNQRPXXVPDRFSGXXSGTSASLAISGLRSEDEADYYCAAWDDSLSGWVFGGXTKLTVLGD

SEQ ID NO: 170 - protein, 250 aa, Artificial Sequence
  UPF3B (1) scFv antibody
  VARIANT 187: Any amino acid
  VARIANT 196: Any amino acid
  VARIANT 206: Any amino acid
  VARIANT 212..213: Any amino acids
  VARIANT 234: Any amino acid
  VARIANT 244: Any amino acid
  VARIANT 248: Any amino acid
EVQLLESGGGLVQPGGSLRLSCAASGFTFSDYYMTWIRQAPGKGLEWVSDISWNGSRTHYADSVKGRFTISRDNSKNTLYLQMNSLRAEDTAVYYCSSHLVYWGQGTLVTVSSGGGGSGGGGSGGGGSQSVLTQPPSASGTPGQRVTISCTGSSSNIGAGYDVHWYQQLPGTAPKLLIYDNNKRPSXVPDRFSGSXSGTSASLAIXGLRSEXXADYYCQTYDSSLSGSVVFGGXTKLTVLGDYXDHDXDY

SEQ ID NO: 171 - protein, 251 aa, Artificial Sequence
  UPF3B (2) scFv antibody
  VARIANT 166: Any amino acid
  VARIANT 197: Any amino acid
  VARIANT 206: Any amino acid
  VARIANT 221: Any amino acid
  VARIANT 243: Any amino acid
EVQLLESGGGLVQPGGSLRLSCAASGFTFSSYAMSWVRQAPGKGLEWVSYISSSSSYANYADSVKGRFTISRDNSKNTLYLQMNSLRAEDTAVYYCARLGVYSGTYLFAFDIWGQGTLVTVSSGGGGSGGGGSGGGGSQSVLTQPPSASGTPGQRVTISCTGSSSXIGAGYDVHWYQQLPGTAPKLLIYGNSNRPSXVPDRFSGSXSGTSASLAISGLRSXDEADYYCQSRDSSLSGWVFGGXTKLTVLGD

SEQ ID NO: 172 - protein, 123 aa, Artificial Sequence
  Apo-A4 (1) scFv antibody
EVQLLESGGGLVQPGGSLRLSCAASGFTFSDYYMSWVRQAPGKGLEWVSGVSWNGSRTHYADSVKGRFTISRDNSKNTLYLQMNSLRAEDTAVYYCARVAYDIDAFDMWGQGTLVTVSSGGGG

SEQ ID NO: 173 - protein, 301 aa, Artificial Sequence
  Apo-A4 (2) scFv antibody
  VARIANT 201: Any amino acid
  VARIANT 238: Any amino acid
  VARIANT 245: Any amino acid
  VARIANT 265..268: Any amino acids
  VARIANT 281: Any amino acid
  VARIANT 285..286: Any amino acids
  VARIANT 288..289: Any amino acids
  VARIANT 293..296: Any amino acids
  VARIANT 298..300: Any amino acids
EVQLLESGGGLVQPGGSLRLSCAASGFTFSDYYMSWVRQAPGKGLEWVSGVSWNGSRTHYADSVKGRFTISRDNSKNTLYLQMNSLRAEDTAVYYCARVAYDIDAFDMWGQGTLVTVSSGGGGSGGGGSGGGGSQSVLTQPPSASGTPGQRVTISCSGSFSNIGSNYVYWYQQLPGTAPKLLIYENNKRPSGVPDRFSGSXSGTSASLAISGLRSEDEADYYCAAWDDSLNGPMFGGXTKLTVLXDYKDHDGDYKDHDIDYKDDXXXXAAHHHHHHSPRWXIRPXXSXXTIHXXXXLXXXD

SEQ ID NO: 174 - protein, 232 aa, Artificial Sequence
  Apo-A4 (3) scFv antibody
  VARIANT 196: Any amino acid
  VARIANT 213: Any amino acid
EVQLLESGGGLVQPGGSLRLSCAASGFTFSSYSMNWVRQAPGKGLEWVSAITGSGNATFYADSVKGRFTISRDNSKNTLYLQMNSLRAEDTAVYYCTTGATTRWGQGTLVTVSSGGGGSGGGGSGGGGSQSVLTQPPSASGTPGQRVTISCSGSRSNIGSNHVFWYQQLPGTAPKLLIYENNKRPSGVPDRFSGSXSGTSASLAISGLRSEDXADYYCAAWDDSLSGWVFGG

SEQ ID NO: 175 - protein, 196 aa, Artificial Sequence
  TBC1D9 (2) scFv antibody
  VARIANT 168: Any amino acid
EVQLLESGGGLVQPGGSLRLSCAASGFTFSNAWMSWVRQAPGKGLEWVSFISSSSSYIYYADSVKGRFTISRDNSKNTLYLQMNSLRAEDTAVYYCARVNLVGCTNGVCNGHDYWGQGTLVTVSSGGGGSGGGGSGGGGSQSVLTQPPSASGTPGQRVTISCSGSSSXIGSNTVNWYQQLPGTAPKLLIYDNNKRP

SEQ ID NO: 176 - protein, 234 aa, Artificial Sequence
  TBC1D9 (3) scFv antibody
  VARIANT 159: Any amino acid
  VARIANT 189: Any amino acid
  VARIANT 198: Any amino acid
  VARIANT 215: Any amino acid
EVQLLESGGGLVQPGGSLRLSCAASGFTFGDYAMSWVRQAPGKGLEWVSAISGSGGSTYYADSVKGRFTISRDNSKNTLYLQMNSLRAEDTAVYYCAKGRTMASHWGQGTLVTVSSGGGGSGGGGSGGGGSQSVLTQPPSASGTPGQRVTISCSGSSSXIGNNHVSWYQQLPGTAPKLLIYGNSNRPSXVPDRFSGSXSGTSASLAISGLRSEDXADYYCAAWDNSLKVWMFGG

SEQ ID NO: 177 - protein, 239 aa, Artificial Sequence
  ORP-3 (1) scFv antibody
  VARIANT 164: Any amino acid
  VARIANT 193..194: Any amino acid
  VARIANT 202..203: Any amino acids
  VARIANT 208: Any amino acid
  VARIANT 220: Any amino acid
EVQLLESGGGLVQPGGSLRLSCAASGFTFSSNYMSWVRQAPGKGLEWVSYISGNSGYTNYADSVKGRFTISRDNSKNTLYLQMNSLRAEDTAVYYCARHAGSYDMYGMDVWGQGTLVTVSSGGGGSGGGGSGGGGSQSVLTQPPSASGTPGQRVTISCSGSTSXIGSHYVYWYQQLPGTAPKLLIYGNSNRPXXVPDRFSGXXSGTSXSLAISGLRSEDXADYYCQSYDSRLSGWVFGG

SEQ ID NO: 178 - protein, 241 aa, Artificial Sequence
  ORP-3 (2) scFv antibody
  VARIANT 158: Any amino acid
  VARIANT 197: Any amino acid
  VARIANT 227: Any amino acid
  VARIANT 234: Any amino acid
EVQLLESGGGLVQPGGSLRLSCAASGFTFSSYAMHWVRQAPGKGLEWVAVISYDGSNKYYADSVKGRFTISRDNSKNTLYLQMNSLRAEDTAVYYCARKSSLDVWGQGTLVTVSSGGGGSGGGGSGGGGSQSVLTQPPSASGTPGQRVTISCSGSSSXIGNNYVSWYQQLPGTAPKLLIYDDNKRPSGVPDRFSGSXSDTSASLAISGLRSEDEADYYCAAWDDSLXGRVFGGXTKLTVLG

SEQ ID NO: 179 - protein, 254 aa, Artificial Sequence
  CIMS (5) scFv antibody
  VARIANT 3: Any amino acid
  VARIANT 232..233: Any amino acids
  VARIANT 247: Any amino acid
EVXLLESGGGLVQPGGSLRLSCAASGFTFSDHYMDWVRQAPGKGLEWVSGISGSGGSTYYGDSVKGRFTISRDNSKNTLYLQMNSLRAEDTAVYYCASRLYWGQGTLVTVSSGGGGSGGGGSGGGGSQSVLTQPPSASGTPGQRVTISCTGSSSNIGAGYVVHWYQQLPGTAPKLLIYDNDKRPSGVPDRFSGSKSGTSASLAISGLRSEDEADYYCAAWDDSLDAVLFGGXXKLTVLGEQKLISEXDLSGSAA

SEQ ID NO: 180 - protein, 321 aa, Artificial Sequence
  CIMS (13) scFv antibody
  VARIANT 206: Any amino acid
  VARIANT 227: Any amino acid
  VARIANT 244: Any amino acid
  VARIANT 258..259: Any amino acids
  VARIANT 266: Any amino acid
  VARIANT 277: Any amino acid
  VARIANT 286: Any amino acid
  VARIANT 291..293: Any amino acids
  VARIANT 295..297: Any amino acids
  VARIANT 302..304: Any amino acids
  VARIANT 306: Any amino acid
  VARIANT 308..310: Any amino acids
  VARIANT 312..313: Any amino acids
  VARIANT 317..321: Any amino acids
EVQLLESGGGLVQPGGSLRLSCAASGFTFSSYAMSWVRQAPGKGLEWVSAISGSGGRTYYTDSVRDRFTISRDNSKNTLYLQMNSLRAEDTAVYYCARDLMPVCQYCYGMDVWGQGTLVTVSSGGGGSGGGGSGGGGSQSVLTQPPSASGTPGQRVTISCTGSSSNIGAGYDVHWYQQLPGTAPKLLIYSNNQRPSGVPDRFSGSXSGTSASLAISGLRSEDEADYXCQSYDSSLNKDVVFGGXTKLTVLGEQKLISXXDLSGSAXAHHHHHHSPRXPIRPIVSRXTIHWXXXLXXXDWENXXXTXLXXXAXXPPFXXXXX

SEQ ID NO: 181 - protein, 276 aa, Artificial Sequence
  PKB gamma (1) scFv antibody
EVQLLESGGGLVQPGGSLRLSCAASGFTFGSSYMSWVRQAPGKGLEWVSSISSGGSYTYYADSVKGRFTISRDNSKNTLYLQMNSLRAEDTAVYYCARYHASWGRYLDYWGQGTLVTVSSGGGGSGGGGSGGGGSDIQMTQSPSSLSASVGDRVTITCRASQSISSYLNWYQQKPGKAPKLLIYAASSLQSGVPSRFSGSGSGTDFTLTISSLQPEDFATYYCQQVSSWLSTFGQGTKLEIKRLGDYKDHDGDYKDHDIDYKDDDDKAAAHHHHHH

SEQ ID NO: 182 - protein, 275 aa, Artificial Sequence
  PKB gamma (2) scFv antibody
EVQLLESGGGLVQPGGSLRLSCAASGFTFSYSGMGWVRQAPGKGLEWVSYISSGSYYTGYADSVKGRFTISRDNSKNTLYLQMNSLRAEDTAVYYCARYSGWRHGFDYWGQGTLVTVSSGGGGSGGGGSGGGGSDIQMTQSPSSLSASVGDRVTITCRASQSISSYLNWYQQKPGKAPKLLIYAASSLQSGVPSRFSGSGSGTDFTLTISSLQPEDFATYYCQQATVSPSTFGQGTKLEIKRLGDYKDHDGDYKDHDIDYKDDDDKAAAHHHHHH

SEQ ID NO: 183 - protein, 275 aa, Artificial Sequence
  BTK (2) scFv antibody
EVQLLESGGGLVQPGGSLRLSCAASGFTFGSYYMGWVRQAPGKGLEWVSSIGSGYYSTYYADSVKGRFTISRDNSKNTLYLQMNSLRAEDTAVYYCARGPYWWGLDYWGQGTLVTVSSGGGGSGGGGSGGGGSDIQMTQSPSSLSASVGDRVTITCRASQSISSYLNWYQQKPGKAPKLLIYAASSLQSGVPSRFSGSGSGTDFTLTISSLQPEDFATYYCQQWFYHGPHTFGQGTKLEIKRLGDYKDHDGDYKDHDIDYKDDDDKAAAHHHHHH

SEQ ID NO: 184 - protein, 271 aa, Artificial Sequence
  BTK (3) scFv antibody
EVQLLESGGGLVQPGGSLRLSCAASGFTFSSYAMSWVRQAPGKGLEWVSAISGSGGSTYYADSVKGRFTISRDNSKNTLYLQMNSLRAEDTAVYYCARGYYGMDYWGQGTLVTVSSGGGGSGGGGSGGGGSDIQMTQSPSSLSASVGDRVTITCRASQSISSYLNWYQQKPGKAPKLLIYAASSLQSGVPSRFSGSGSGTDFTLTISSLQPEDFATYYCQQTWYLPTFGQGTKLEIKRLGDYKDHDGDYKDHDIDYKDDDDKAAAHHHHHH

SEQ ID NO: 185 - protein, 272 aa, Artificial Sequence
  BTK (4) scFv antibody
EVQLLESGGGLVQPGGSLRLSCAASGFTFSSYAMSWVRQAPGKGLEWVSAISGSGGSTYYADSVKGRFTISRDNSKNTLYLQMNSLRAEDTAVYYCARGYYGLDYWGQGTLVTVSSGGGGSGGGGSGGGGSDIQMTQSPSSLSASVGDRVTITCRASQSISSYLNWYQQKPGKAPKLLIYAASSLQSGVPSRFSGSGSGTDFTLTISSLQPEDFATYYCQQSGAVPPTFGQGTKLEIKRLGDYKDHDGDYKDHDIDYKDDDDKAAAHHHHHH

SEQ ID NO: 186 - protein, 272 aa, Artificial Sequence
  CDK-2 (1) scFv antibody
EVQLLESGGGLVQPGGSLRLSCAASGFTFSSYAMSWVRQAPGKGLEWVSGISSYYGYTYYADSVKGRFTISRDNSKNTLYLQMNSLRAEDTAVYYCARVYGYYMDYWGQGTLVTVSSGGGGSGGGGSGGGGSDIQMTQSPSSLSASVGDRVTITCRASQSISSYLNWYQQKPGKAPKLLIYAASSLQSGVPSRFSGSGSGTDFTLTISSLQPEDFATYYCQQSSSLYTFGQGTKLEIKRLGDYKDHDGDYKDHDIDYKDDDDKAAAHHHHHH

SEQ ID NO: 187 - protein, 274 aa, Artificial Sequence
  CDK-2 (2) scFv antibody
EVQLLESGGGLVQPGGSLRLSCAASGFTFGSSYMGWVRQAPGKGLEWVSSIYGSSSYTSYADSVKGRFTISRDNSKNTLYLQMNSLRAEDTAVYYCARWYWSWSSFDYWGQGTLVTVSSGGGGSGGGGSGGGGSDIQMTQSPSSLSASVGDRVTITCRASQSISSYLNWYQQKPGKAPKLLIYAASSLQSGVPSRFSGSGSGTDFTLTISSLQPEDFATYYCQQGGWPYTFGQGTKLEIKRLGDYKDHDGDYKDHDIDYKDDDDKAAAHHHHHH

SEQ ID NO: 188 - protein, 270 aa, Artificial Sequence
  GM-CSF (4) scFv antibody
EVQLLESGGGLVQPGGSLRLSCAASGFTFSSYGMSWVRQAPGKGLEWVSYIGSGYYYTSYADSVKGRFTISRDNSKNTLYLQMNSLRAEDTAVYYCARGGYFDYWGQGTLVTVSSGGGGSGGGGSGGGGSDIQMTQSPSSLSASVGDRVTITCRASQSISSYLNWYQQKPGKAPKLLIYAASSLQSGVPSRFSGSGSGTDFTLTISSLQPEDFATYYCQQGYHLPTFGQGTKLEIKRLGDYKDHDGDYKDHDIDYKDDDDKAAAHHHHHH

SEQ ID NO: 189 - protein, 279 aa, Artificial Sequence
  GM-CSF (5) scFv antibody
EVQLLESGGGLVQPGGSLRLSCAASGFTFGSGYMYWVRQAPGKGLEWVSSISSSYGYTYYADSVKGRFTISRDNSKNTLYLQMNSLRAEDTAVYYCARGVVYPSNYFDYWGQGTLVTVSSGGGGSGGGGSGGGGSDIQMTQSPSSLSASVGDRVTITCRASQSISSYLNWYQQKPGKAPKLLIYAASSLQSGVPSRFSGSGSGTDFTLTISSLQPEDFATYYCQQGYPWWWGPYTFGQGTKLEIKRLGDYKDHDGDYKDHDIDYKDDDDKAAAHHHHHH

SEQ ID NO: 190 - protein, 277 aa, Artificial Sequence
  GM-CSF (6) scFv antibody
EVQLLESGGGLVQPGGSLRLSCAASGFTFSSYAMSWVRQAPGKGLEWVSAISGSGGSTYYADSVKGRFTISRDNSKNTLYLQMNSLRAEDTAVYYCARYYSGSWGHYFDYWGQGTLVTVSSGGGGSGGGGSGGGGSDIQMTQSPSSLSASVGDRVTITCRASQSISSYLNWYQQKPGKAPKLLIYAASSLQSGVPSRFSGSGSGTDFTLTISSLQPEDFATYYCQQVFSNPLTFGQGTKLEIKRLGDYKDHDGDYKDHDIDYKDDDDKAAAHHHHHH

SEQ ID NO: 191 - protein, 278 aa, Artificial Sequence
  FASN (1) scFv antibody
EVQLLESGGGLVQPGGSLRLSCAASGFTFGYSGMSWVRQAPGKGLEWVSYIGGGYGSTSYADSVKGRFTISRDNSKNTLYLQMNSLRAEDTAVYYCARWSWHHGSYTMDYWGQGTLVTVSSGGGGSGGGGSGGGGSDIQMTQSPSSLSASVGDRVTITCRASQSISSYLNWYQQKPGKAPKLLIYAASSLQSGVPSRFSGSGSGTDFTLTISSLQPEDFATYYCQQGYSWFLPTFGQGTKLEIKRLGDYKDHDGDYKDHDIDYKDDDDKAAAHHHHHH

SEQ ID NO: 192 - protein, 274 aa, Artificial Sequence
  FASN (2) scFv antibody
EVQLLESGGGLVQPGGSLRLSCAASGFTFSGSSMSWVRQAPGKGLEWVSSIYYGSGYTYYADSVKGRFTISRDNSKNTLYLQMNSLRAEDTAVYYCARGTYLDYWGQGTLVTVSSGGGGSGGGGSGGGGSDIQMTQSPSSLSASVGDRVTITCRASQSISSYLNWYQQKPGKAPKLLIYAASSLQSGVPSRFSGSGSGTDFTLTISSLQPEDFATYYCQQHTWWSSYLHTFGQGTKLEIKRLGDYKDHDGDYKDHDIDYKDDDDKAAAHHHHHH

SEQ ID NO: 193 - protein, 278 aa, Artificial Sequence
  FASN (3) scFv antibody
EVQLLESGGGLVQPGGSLRLSCAASGFTFYGYSMGWVRQAPGKGLEWVSSISYSGGYTYYADSVKGRFTISRDNSKNTLYLQMNSLRAEDTAVYYCARWSHVDSGALDYWGQGTLVTVSSGGGGSGGGGSGGGGSDIQMTQSPSSLSASVGDRVTITCRASQSISSYLNWYQQKPGKAPKLLIYAASSLQSGVPSRFSGSGSGTDFTLTISSLQPEDFATYYCQQYWYTYWLPTFGQGTKLEIKRLGDYKDHDGDYKDHDIDYKDDDDKAAAHHHHHH

SEQ ID NO: 194 - protein, 280 aa, Artificial Sequence
  FASN (4) scFv antibody
EVQLLESGGGLVQPGGSLRLSCAASGFTFSGSGMSWVRQAPGKGLEWVSYIGSYYGGTYYADSVKGRFTISRDNSKNTLYLQMNSLRAEDTAVYYCARAFVNGVGGWGPYFDYWGQGTLVTVSSGGGGSGGGGSGGGGSDIQMTQSPSSLSASVGDRVTITCRASQSISSYLNWYQQKPGKAPKLLIYAASSLQSGVPSRFSGSGSGTDFTLTISSLQPEDFATYYCQQSFFPPYTFGQGTKLEIKRLGDYKDHDGDYKDHDIDYKDDDDKAAAHHHHHH

SEQ ID NO: 195 - protein, 270 aa, Artificial Sequence
  GAK (1) scFv antibody
EVQLLESGGGLVQPGGSLRLSCAASGFTFGSSYMSWVRQAPGKGLEWVSSISSSSYGTYYADSVKGRFTISRDNSKNTLYLQMNSLRAEDTAVYYCARNPGFDYWGQGTLVTVSSGGGGSGGGGSGGGGSDIQMTQSPSSLSASVGDRVTITCRASQSISSYLNWYQQKPGKAPKLLIYAASSLQSGVPSRFSGSGSGTDFTLTISSLQPEDFATYYCQQHYWLPTFGQGTKLEIKRLGDYKDHDGDYKDHDIDYKDDDDKAAAHHHHHH

SEQ ID NO: 196 - protein, 273 aa, Artificial Sequence
  GAK (2) scFv antibody
EVQLLESGGGLVQPGGSLRLSCAASGFTFGGGGMSWVRQAPGKGLEWVSSISSSGYGTYYADSVKGRFTISRDNSKNTLYLQMNSLRAEDTAVYYCARWGWSYLDYWGQGTLVTVSSGGGGSGGGGSGGGGSDIQMTQSPSSLSASVGDRVTITCRASQSISSYLNWYQQKPGKAPKLLIYAASSLQSGVPSRFSGSGSGTDFTLTISSLQPEDFATYYCQQSYYPLYTFGQGTKLEIKRLGDYKDHDGDYKDHDIDYKDDDDKAAAHHHHHH

SEQ ID NO: 197 - protein, 278 aa, Artificial Sequence
  GAK (3) scFv antibody
EVQLLESGGGLVQPGGSLRLSCAASGFTFGSSYMSWVRQAPGKGLEWVSGISSSGYGTYYADSVKGRFTISRDNSKNTLYLQMNSLRAEDTAVYYCARGYYHYGYAGFYFDYWGQGTLVTVSSGGGGSGGGGSGGGGSDIQMTQSPSSLSASVGDRVTITCRASQSISSYLNWYQQKPGKAPKLLIYAASSLQSGVPSRFSGSGSGTDFTLTISSLQPEDFATYYCQQSAYLFTFGQGTKLEIKRLGDYKDHDGDYKDHDIDYKDDDDKAAAHHHHHH

SEQ ID NO: 198 - protein, 274 aa, Artificial Sequence
  HADH2 (1) scFv antibody
EVQLLESGGGLVQPGGSLRLSCAASGFTFSSYYMSWVRQAPGKGLEWVSSISSGGYGTGYADSVKGRFTISRDNSKNTLYLQMNSLRAEDTAVYYCARSYGWGPLDYWGQGTLVTVSSGGGGSGGGGSGGGGSDIQMTQSPSSLSASVGDRVTITCRASQSISSYLNWYQQKPGKAPKLLIYAASSLQSGVPSRFSGSGSGTDFTLTISSLQPEDFATYYCQQGYNWPYTFGQGTKLEIKRLGDYKDHDGDYKDHDIDYKDDDDKAAAHHHHHH

SEQ ID NO: 199 - protein, 278 aa, Artificial Sequence
  HADH2 (2) scFv antibody
EVQLLESGGGLVQPGGSLRLSCAASGFTFSGSYMSWVRQAPGKGLEWVSSISGGSYYTSYADSVKGRFTISRDNSKNTLYLQMNSLRAEDTAVYYCARWSFNVVAHHWLDYWGQGTLVTVSSGGGGSGGGGSGGGGSDIQMTQSPSSLSASVGDRVTITCRASQSISSYLNWYQQKPGKAPKLLIYAASSLQSGVPSRFSGSGSGTDFTLTISSLQPEDFATYYCQQSYYAPYTFGQGTKLEIKRLGDYKDHDGDYKDHDIDYKDDDDKAAAHHHHHH

SEQ ID NO: 200 - protein, 274 aa, Artificial Sequence
  HADH2 (3) scFv antibody
EVQLLESGGGLVQPGGSLRLSCAASGFTFGSSYMSWVRQAPGKGLEWVSSISSYGYYTGYADSVKGRFTISRDNSKNTLYLQMNSLRAEDTAVYYCARSYGSWYFDYWGQGTLVTVSSGGGGSGGGGSGGGGSDIQMTQSPSSLSASVGDRVTITCRASQSISSYLNWYQQKPGKAPKLLIYAASSLQSGVPSRFSGSGSGTDFTLTISSLQPEDFATYYCQQGFVGPSTFGQGTKLEIKRLGDYKDHDGDYKDHDIDYKDDDDKAAAHHHHHH

SEQ ID NO: 201 - protein, 282 aa, Artificial Sequence
  HADH2 (4) scFv antibody
EVQLLESGGGLVQPGGSLRLSCAASGFTFGGSYMSWVRQAPGKGLEWVSSISGGSYYTSYADSVKGRFTISRDNSKNTLYLQMNSLRAEDTAVYYCARWSPPSYSYGFSYYRYFDYWGQGTLVTVSSGGGGSGGGGSGGGGSDIQMTQSPSSLSASVGDRVTITCRASQSISSYLNWYQQKPGKAPKLLIYAASSLQSGVPSRFSGSGSGTDFTLTISSLQPEDFATYYCQQSYPPSTFGQGTKLEIKRLGDYKDHDGDYKDHDIDYKDDDDKAAAHHHHHH

SEQ ID NO: 202 - protein, 279 aa, Artificial Sequence
  IL-6 (5) scFv antibody
EVQLLESGGGLVQPGGSLRLSCAASGFTFGYSYMSWVRQAPGKGLEWVSAISGSGGSTYYADSVKGRFTISRDNSKNTLYLQMNSLRAEDTAVYYCARYHASYPSYYWYIDYWGQGTLVTVSSGGGGSGGGGSGGGGSDIQMTQSPSSLSASVGDRVTITCRASQSISSYLNWYQQKPGKAPKLLIYAASSLQSGVPSRFSGSGSGTDFTLTISSLQPEDFATYYCQQVWHGLHTFGQGTKLEIKRLGDYKDHDGDYKDHDIDYKDDDDKAAAHHHHHH

SEQ ID NO: 203 - protein, 272 aa, Artificial Sequence
  IL-6 (6) scFv antibody
EVQLLESGGGLVQPGGSLRLSCAASGFTFGSSSMSWVRQAPGKGLEWVSSISYGSSSTSYADSVKGRFTISRDNSKNTLYLQMNSLRAEDTAVYYCARGGYGFDYWGQGTLVTVSSGGGGSGGGGSGGGGSDIQMTQSPSSLSASVGDRVTITCRASQSISSYLNWYQQKPGKAPKLLIYAASSLQSGVPSRFSGSGSGTDFTLTISSLQPEDFATYYCQQGGYWPLTFGQGTKLEIKRLGDYKDHDGDYKDHDIDYKDDDDKAAAHHHHHH

SEQ ID NO: 204 - protein, 274 aa, Artificial Sequence
  IL-6 (7) scFv antibody
EVQLLESGGGLVQPGGSLRLSCAASGFTFGYSSMGWVRQAPGKGLEWVSGISSYGYGTYYADSVKGRFTISRDNSKNTLYLQMNSLRAEDTAVYYCARYHSGWGMDYWGQGTLVTVSSGGGGSGGGGSGGGGSDIQMTQSPSSLSASVGDRVTITCRASQSISSYLNWYQQKPGKAPKLLIYAASSLQSGVPSRFSGSGSGTDFTLTISSLQPEDFATYYCQQSFAYLHTFGQGTKLEIKRLGDYKDHDGDYKDHDIDYKDDDDKAAAHHHHHH

SEQ ID NO: 205 - protein, 273 aa, Artificial Sequence
  IL-6 (8) scFv antibody
EVQLLESGGGLVQPGGSLRLSCAASGFTFSGYGMSWVRQAPGKGLEWVSSISSSSSYTYYADSVKGRFTISRDNSKNTLYLQMNSLRAEDTAVYYCARYGWGYFDYWGQGTLVTVSSGGGGSGGGGSGGGGSDIQMTQSPSSLSASVGDRVTITCRASQSISSYLNWYQQKPGKAPKLLIYAASSLQSGVPSRFSGSGSGTDFTLTISSLQPEDFATYYCQQSSYYPPTFGQGTKLEIKRLGDYKDHDGDYKDHDIDYKDDDDKAAAHHHHHH

SEQ ID NO: 206 - protein, 265 aa, Artificial Sequence
  Keratin 19 (1) scFv antibody
  VARIANT 237: Any amino acid
  VARIANT 241: Any amino acid
  VARIANT 252: Any amino acid
EVQLLESGGGLVQPGGSLRLSCAASGFTFGYYYMYWVRQAPGKGLEWVSSIGSSGSSTSYADSVKGRFTISRDNSKNTLYLQMNSLRAEDTAVYYCARGHAFFDYWGQGTLVTVSSGGGGSGGGGSGGGGSDIQMTQSPSSLSASVGDRVTITCRASQSISSYLNWYQQKPGKAPKLLIYAASSLQSGVPSRFSGSGSGTDFTLTISSLQPEDFATYYCQQVWYWPPTFGQGTKLEXKRLXDYKDHDGDYKXHDIDYKDDDDKAA

SEQ ID NO: 207 - protein, 267 aa, Artificial Sequence
  Keratin 19 (2) scFv antibody
  VARIANT 235: Any amino acid
  VARIANT 243: Any amino acid
EVQLLESGGGLVQPGGSLRLSCAASGFTFYGSSMSWVRQAPGKGLEWVSYIGSDSSYTSYADSVKGRFTISRDNSKNTLYLQMNSLRAEDTAVYYCARSYWSVFDYWGQGTLVTVSSGGGGSGGGGSGGGGSDIQMTQSPSSLSASVGDRVTITCRASQSISSYLNWYQQKPGKAPKLLIYAASSLQSGVPSRFSGSGSGTDFTLTISSLQPEDFATYYCQQSYWSWLPTFGQGXKLEIKRLXDYKDHDGDYKDHDIDYKDDDDKAA

SEQ ID NO: 208 - protein, 307 aa, Artificial Sequence
  Keratin 19 (3) scFv antibody
  VARIANT 235: Any amino acid
  VARIANT 240: Any amino acid
  VARIANT 245: Any amino acid
  VARIANT 267..268: Any amino acids
  VARIANT 281..283: Any amino acids
  VARIANT 285: Any amino acid
  VARIANT 290..292: Any amino acids
  VARIANT 297..298: Any amino acids
  VARIANT 300..305: Any amino acids
  VARIANT 307: Any amino acid
EVQLLESGGGLVQPGGSLRLSCAASGFTFSSYAMSWVRQAPGKGLEWVSAISGSGGSTYYADSVKGRFTISRDNSKNTLYLQMNSLRAEDTAVYYCARWGGWWLDYWGQGTLVTVSSGGGGSGGGGSGGGGSDIQMTQSPSSLSASVGDRVTITCRASQSISSYLNWYQQKPGKAPKLLIYAASSLQSGVPSRFSGSGSGTDFTLTISSLQPEDFATYYCQQWWSYYGALFTFGXGTKLXIKRLXDYKDHDGDYKDHDIDYKDDDDXXPPIIIIIIDHRGXXXIXPIVSXXXRAHWXXFXXXXXXKX

SEQ ID NO: 209 - protein, 274 aa, Artificial Sequence
  KSYK (1) scFv antibody
EVQLLESGGGLVQPGGSLRLSCAASGFTFSSYAMSWVRQAPGKGLEWVSGISSGYYYTYYADSVKGRFTISRDNSKNTLYLQMNSLRAEDTAVYYCARVGWYWNGLDYWGQGTLVTVSSGGGGSGGGGSGGGGSDIQMTQSPSSLSASVGDRVTITCRASQSISSYLNWYQQKPGKAPKLLIYAASSLQSGVPSRFSGSGSGTDFTLTISSLQPEDFATYYCQQSSVLPTFGQGTKLEIKRLGDYKDHDGDYKDHDIDYKDDDDKAAAHHHHHH

SEQ ID NO: 210 - protein, 272 aa, Artificial Sequence; identical to SEQ ID NO: 185
  KSYK (2) scFv antibody

SEQ ID NO: 211 - protein, 284 aa, Artificial Sequence
  MATK (1) scFv antibody
EVQLLESGGGLVQPGGSLRLSCAASGFTFGSSYMGWVRQAPGKGLEWVSGIGGYGYYTGYADSVKGRFTISRDNSKNTLYLQMNSLRAEDTAVYYCARYDWGHSPGSWYYGSFDYWGQGTLVTVSSGGGGSGGGGSGGGGSQSVLTQPPSASGTPGQRVTISCSGSSSNIGSSYVYWYQQLPGTAPKLLIYSNNQRPSGVPDRFSGSKSGTSASLAISGLRSEDEADYYCAAWAGAYHSHVVFGGGTKLTVLGDYKDHDGDYKDHDIDYKDDDDKAAAHHHHHH

SEQ ID NO: 212 - protein, 275 aa, Artificial Sequence
  MATK (2) scFv antibody
EVQLLESGGGLVQPGGSLRLSCAASGFTFYGYSMYWVRQAPGKGLEWVSYIGSYSGSTSYADSVKGRFTISRDNSKNTLYLQMNSLRAEDTAVYYCARYYHYYHTWLDYWGQGTLVTVSSGGGGSGGGGSGGGGSDIQMTQSPSSLSASVGDRVTITCRASQSISSYLNWYQQKPGKAPKLLIYAASSLQSGVPSRFSGSGSGTDFTLTISSLQPEDFATYYCQQGFYPFTFGQGTKLEIKRLGDYKDHDGDYKDHDIDYKDDDDKAAAHHHHHH

SEQ ID NO: 213 - protein, 287 aa, Artificial Sequence
  MATK (3) scFv antibody
EVQLLESGGGLVQPGGSLRLSCAASGFTFSSYAMSWVRQAPGKGLEWVSAISGSGGSTYYADSVKGRFTISRDNSKNTLYLQMNSLRAEDTAVYYCARYPFYDYSVVGGRWPSYGIDYWGQGTLVTVSSGGGGSGGGGSGGGGSDIQMTQSPSSLSASVGDRVTITCRASQSISSYLNWYQQKPGKAPKLLIYAASSLQSGVPSRFSGSGSGTDFTLTISSLQPEDFATYYCQQWNSGVWLHTFGQGTKLEIKRLGDYKDHDGDYKDHDIDYKDDDDKAAAHHHHHH

SEQ ID NO: 214 - protein, 271 aa, Artificial Sequence
  MAPK-1 (1) scFv antibody
EVQLLESGGGLVQPGGSLRLSCAASGFTFSGSGMYWVRQAPGKGLEWVSYISGSGSYTDYADSVKGRFTISRDNSKNTLYLQMNSLRAEDTAVYYCARSGSFDYWGQGTLVTVSSGGGGSGGGGSGGGGSDIQMTQSPSSLSASVGDRVTITCRASQSISSYLNWYQQKPGKAPKLLIYAASSLQSGVPSRFSGSGSGTDFTLTISSLQPEDFATYYCQQVSSSLYTFGQGTKLEIKRLGDYKDHDGDYKDHDIDYKDDDDKAAAHHHHHH

SEQ ID NO: 215 - protein, 274 aa, Artificial Sequence
  MAPK-1 (2) scFv antibody
EVQLLESGGGLVQPGGSLRLSCAASGFTFSYGDMSWVRQAPGKGLEWVSGISSGGSSTYYADSVKGRFTISRDNSKNTLYLQMNSLRAEDTAVYYCARGYGYAWYFDYWGQGTLVTVSSGGGGSGGGGSGGGGSDIQMTQSPSSLSASVGDRVTITCRASQSISSYLNWYQQKPGKAPKLLIYAASSLQSGVPSRFSGSGSGTDFTLTISSLQPEDFATYYCQQWWHPYTFGQGTKLEIKRLGDYKDHDGDYKDHDIDYKDDDDKAAAHHHHHH

SEQ ID NO: 216 - protein, 270 aa, Artificial Sequence
  MAPK-1 (3) scFv antibody
EVQLLESGGGLVQPGGSLRLSCAASGFTFSYSYMYWVRQAPGKGLEWVSSISSGGDYTYYADSVKGRFTISRDNSKNTLYLQMNSLRAEDTAVYYCARNFWFDYWGQGTLVTVSSGGGGSGGGGSGGGGSDIQMTQSPSSLSASVGDRVTITCRASQSISSYLNWYQQKPGKAPKLLIYAASSLQSGVPSRFSGSGSGTDFTLTISSLQPEDFATYYCQQASGLYTFGQGTKLEIKRLGDYKDHDGDYKDHDIDYKDDDDKAAAHHHHHH

SEQ ID NO: 217 - protein, 276 aa, Artificial Sequence
  MAPK-1 (4) scFv antibody
EVQLLESGGGLVQPGGSLRLSCAASGFTFSYSSMSWVRQAPGKGLEWVSAISGSGGSTYYADSVKGRFTISRDNSKNTLYLQMNSLRAEDTAVYYCARHYPFYWFDYWGQGTLVTVSSGGGGSGGGGSGGGGSDIQMTQSPSSLSASVGDRVTITCRASQSISSYLNWYQQKPGKAPKLLIYAASSLQSGVPSRFSGSGSGTDFTLTISSLQPEDFATYYCQQGGSWAYPLTFGQGTKLEIKRLGDYKDHDGDYKDHDIDYKDDDDKAAAHHHHHH

SEQ ID NO: 218 - protein, 274 aa, Artificial Sequence
  MAPK-8 (1) scFv antibody
EVQLLESGGGLVQPGGSLRLSCAASGFTFGYGGMSWVRQAPGKGLEWVSSIYGSSSSTYYADSVKGRFTISRDNSKNTLYLQMNSLRAEDTAVYYCARHWRSVYFDYWGQGTLVTVSSGGGGSGGGGSGGGGSDIQMTQSPSSLSASVGDRVTITCRASQSISSYLNWYQQKPGKAPKLLIYAASSLQSGVPSRFSGSGSGTDFTLTISSLQPEDFATYYCQQGWGSPLTFGQGTKLEIKRLGDYKDHDGDYKDHDIDYKDDDDKAAAHHHHHH

SEQ ID NO: 219 - protein, 270 aa, Artificial Sequence
  MAPK-8 (2) scFv antibody
EVQLLESGGGLVQPGGSLRLSCAASGFTFSGSYMSWVRQAPGKGLEWVSSIYGYSSYTYYADSVKGRFTISRDNSKNTLYLQMNSLRAEDTAVYYCARGSYLDYWGQGTLVTVSSGGGGSGGGGSGGGGSDIQMTQSPSSLSASVGDRVTITCRASQSISSYLNWYQQKPGKAPKLLIYAASSLQSGVPSRFSGSGSGTDFTLTISSLQPEDFATYYCQQYWYPYTFGQGTKLEIKRLGDYKDHDGDYKDHDIDYKDDDDKAAAHHHHHH

SEQ ID NO: 220 - protein, 272 aa, Artificial Sequence
  MAPK-8 (3) scFv antibody
EVQLLESGGGLVQPGGSLRLSCAASGFTFGYYSMSWVRQAPGKGLEWVSSISSSSSYTYYADSVKGRFTISRDNSKNTLYLQMNSLRAEDTAVYYCARHYSSFDYWGQGTLVTVSSGGGGSGGGGSGGGGSDIQMTQSPSSLSASVGDRVTITCRASQSISSYLNWYQQKPGKAPKLLIYAASSLQSGVPSRFSGSGSGTDFTLTISSLQPEDFATYYCQQSYWYPFTFGQGTKLEIKRLGDYKDHDGDYKDHDIDYKDDDDKAAAHHHHHH

SEQ ID NO: 221 - protein, 275 aa, Artificial Sequence
  Osteopontin (1) scFv antibody
EVQLLESGGGLVQPGGSLRLSCAASGFTFSSYAMSWVRQAPGKGLEWVSAISGSGGSTYYADSVKGRFTISRDNSKNTLYLQMNSLRAEDTAVYYCARAYSWFDYWGQGTLVTVSSGGGGSGGGGSGGGGSDIQMTQSPSSLSASVGDRVTITCRASQSISSYLNWYQQKPGKAPKLLIYAASSLQSGVPSRFSGSGSGTDFTLTISSLQPEDFATYYCQQVAGYYHYPFTFGQGTKLEIKRLGDYKDHDGDYKDHDIDYKDDDDKAAAHHHHHH

SEQ ID NO: 222 - protein, 273 aa, Artificial Sequence
  Osteopontin (2) scFv antibody
EVQLLESGGGLVQPGGSLRLSCAASGFTFSSYAMSWVRQAPGKGLEWVSAISGSGGSTYYADSVKGRFTISRDNSKNTLYLQMNSLRAEDTAVYYCARYHYNYYMDYWGQGTLVTVSSGGGGSGGGGSGGGGSDIQMTQSPSSLSASVGDRVTITCRASQSISSYLNWYQQKPGKAPKLLIYAASSLQSGVPSRFSGSGSGTDFTLTISSLQPEDFATYYCQQYSYLLTFGQGTKLEIKRLGDYKDHDGDYKDHDIDYKDDDDKAAAHHHHHH

SEQ ID NO: 223 - protein, 275 aa, Artificial Sequence
  Osteopontin (3) scFv antibody
EVQLLESGGGLVQPGGSLRLSCAASGFTFSSYAMSWVRQAPGKGLEWVSAISGSGGSTYYADSVKGRFTISRDNSKNTLYLQMNSLRAEDTAVYYCARAYSWFDYWGQGTLVTVSSGGGGSGGGGSGGGGSDIQMTQSPSSLSASVGDRVTITCRASQSISSYLNWYQQKPGKAPKLLIYAASSLQSGVPSRFSGSGSGTDFTLTISSLQPEDFATYYCQQVTSGGHWPFTFGQGTKLEIKRLGDYKDHDGDYKDHDIDYKDDDDKAAAHHHHHH

SEQ ID NO: 224 - protein, 274 aa, Artificial Sequence
  P85A (1) scFv antibody
EVQLLESGGGLVQPGGSLRLSCAASGFTFYSSSMSWVRQAPGKGLEWVSGISSSYSYTYYADSVKGRFTISRDNSKNTLYLQMNSLRAEDTAVYYCARYSSYGSFDYWGQGTLVTVSSGGGGSGGGGSGGGGSDIQMTQSPSSLSASVGDRVTITCRASQSISSYLNWYQQKPGKAPKLLIYAASSLQSGVPSRFSGSGSGTDFTLTISSLQPEDFATYYCQQSSAFPSTFGQGTKLEIKRLGDYKDHDGDYKDHDIDYKDDDDKAAAHHHHHH

SEQ ID NO: 225 - protein, 273 aa, Artificial Sequence
  P85A (2) scFv antibody
EVQLLESGGGLVQPGGSLRLSCAASGFTFSSYSMGWVRQAPGKGLEWVSYIGYSSGSTYYADSVKGRFTISRDNSKNTLYLQMNSLRAEDTAVYYCARDRYSYFDYWGQGTLVTVSSGGGGSGGGGSGGGGSDIQMTQSPSSLSASVGDRVTITCRASQSISSYLNWYQQKPGKAPKLLIYAASSLQSGVPSRFSGSGSGTDFTLTISSLQPEDFATYYCQQWSYGPLTFGQGTKLEIKRLGDYKDHDGDYKDHDIDYKDDDDKAAAHHHHHH

SEQ ID NO: 226 - protein, 276 aa, Artificial Sequence
  P85A (3) scFv antibody
EVQLLESGGGLVQPGGSLRLSCAASGFTFSSYAMSWVRQAPGKGLEWVSGISSGYYYTSYADSVKGRFTISRDNSKNTLYLQMNSLRAEDTAVYYCARNGAGSYSWFDYWGQGTLVTVSSGGGGSGGGGSGGGGSDIQMTQSPSSLSASVGDRVTITCRASQSISSYLNWYQQKPGKAPKLLIYAASSLQSGVPSRFSGSGSGTDFTLTISSLQPEDFATYYCQQSSVWPFTFGQGTKLEIKRLGDYKDHDGDYKDHDIDYKDDDDKAAAHHHHHH

SEQ ID NO: 227 - protein, 272 aa, Artificial Sequence
  PTK6 scFv antibody
EVQLLESGGGLVQPGGSLRLSCAASGFTFSSYAMSWVRQAPGKGLEWVSAISGSGGSTYYADSVKGRFTISRDNSKNTLYLQMNSLRAEDTAVYYCARGGHGLDYWGQGTLVTVSSGGGGSGGGGSGGGGSDIQMTQSPSSLSASVGDRVTITCRASQSISSYLNWYQQKPGKAPKLLIYAASSLQSGVPSRFSGSGSGTDFTLTISSLQPEDFATYYCQQGSDVPFTFGQGTKLEIKRLGDYKDHDGDYKDHDIDYKDDDDKAAAHHHHHH

SEQ ID NO: 228 - protein, 277 aa, Artificial Sequence
  PTPN1 (1) scFv antibody
EVQLLESGGGLVQPGGSLRLSCAASGFTFGYSSMSWVRQAPGKGLEWVSSISYSGSGTGYADSVKGRFTISRDNSKNTLYLQMNSLRAEDTAVYYCARGWYPHPGHWYIDYWGQGTLVTVSSGGGGSGGGGSGGGGSDIQMTQSPSSLSASVGDRVTITCRASQSISSYLNWYQQKPGKAPKLLIYAASSLQSGVPSRFSGSGSGTDFTLTISSLQPEDFATYYCQQHFSLPTFGQGTKLEIKRLGDYKDHDGDYKDHDIDYKDDDDKAAAHHHHHH

SEQ ID NO: 229 - protein, 275 aa, Artificial Sequence
  PTPN1 (2) scFv antibody
EVQLLESGGGLVQPGGSLRLSCAASGFTFYSYGMYWVRQAPGKGLEWVSAISGSGGSTYYADSVKGRFTISRDNSKNTLYLQMNSLRAEDTAVYYCARGGYYAHYAFDYWGQGTLVTVSSGGGGSGGGGSGGGGSDIQMTQSPSSLSASVGDRVTITCRASQSISSYLNWYQQKPGKAPKLLIYAASSLQSGVPSRFSGSGSGTDFTLTISSLQPEDFATYYCQQSSTPFTFGQGTKLEIKRLGDYKDHDGDYKDHDIDYKDDDDKAAAHHHHHH

SEQ ID NO: 230 - protein, 272 aa, Artificial Sequence
  PTPN1 (3) scFv antibody
EVQLLESGGGLVQPGGSLRLSCAASGFTFSYYSMSWVRQAPGKGLEWVSSISSSGGGTSYADSVKGRFTISRDNSKNTLYLQMNSLRAEDTAVYYCARWFSSAFDYWGQGTLVTVSSGGGGSGGGGSGGGGSDIQMTQSPSSLSASVGDRVTITCRASQSISSYLNWYQQKPGKAPKLLIYAASSLQSGVPSRFSGSGSGTDFTLTISSLQPEDFATYYCQQGVPPYTFGQGTKLEIKRLGDYKDHDGDYKDHDIDYKDDDDKAAAHHHHHH

SEQ ID NO: 231 - protein, 273 aa, Artificial Sequence
  RPS6KA2 (1) scFv antibody
EVQLLESGGGLVQPGGSLRLSCAASGFTFSSYAMSWVRQAPGKGLEWVSAISGSGGSTYYADSVKGRFTISRDNSKNTLYLQMNSLRAEDTAVYYCARRYSGYFDYWGQGTLVTVSSGGGGSGGGGSGGGGSDIQMTQSPSSLSASVGDRVTITCRASQSISSYLNWYQQKPGKAPKLLIYAASSLQSGVPSRFSGSGSGTDFTLTISSLQPEDFATYYCQQNWWGLPTFGQGTKLEIKRLGDYKDHDGDYKDHDIDYKDDDDKAAAHHHHHH

SEQ ID NO: 232 - protein, 272 aa, Artificial Sequence
  RPS6KA2 (2) scFv antibody
EVQLLESGGGLVQPGGSLRLSCAASGFTFYGSYMYWVRQAPGKGLEWVSGISPYSSSTYYADSVKGRFTISRDNSKNTLYLQMNSLRAEDTAVYYCARGFPFIDYWGQGTLVTVSSGGGGSGGGGSGGGGSDIQMTQSPSSLSASVGDRVTITCRASQSISSYLNWYQQKPGKAPKLLIYAASSLQSGVPSRFSGSGSGTDFTLTISSLQPEDFATYYCQQNGVGLLTFGQGTKLEIKRLGDYKDHDGDYKDHDIDYKDDDDKAAAHHHHHH

SEQ ID NO: 233 - protein, 282 aa, Artificial Sequence
  RPS6KA2 (3) scFv antibody
EVQLLESGGGLVQPGGSLRLSCAASGFTFYGYGMSWVRQAPGKGLEWVSGISGGSGSTGYADSVKGRFTISRDNSKNTLYLQMNSLRAEDTAVYYCARGYGTYARSSNFPSMDYWGQGTLVTVSSGGGGSGGGGSGGGGSDIQMTQSPSSLSASVGDRVTITCRASQSISSYLNWYQQKPGKAPKLLIYAASSLQSGVPSRFSGSGSGTDFTLTISSLQPEDFATYYCQQHYWWGLFTFGQGTKLEIKRLGDYKDHDGDYKDHDIDYKDDDDKAAAHHHHHH

SEQ ID NO: 234 - protein, 280 aa, Artificial Sequence
  STAP2 (1) scFv antibody
EVQLLESGGGLVQPGGSLRLSCAASGFTFSGYSMGWVRQAPGKGLEWVSGISSYYYGTSYADSVKGRFTISRDNSKNTLYLQMNSLRAEDTAVYYCARSWTVGSSWDGDAFDYWGQGTLVTVSSGGGGSGGGGSGGGGSDIQMTQSPSSLSASVGDRVTITCRASQSISSYLNWYQQKPGKAPKLLIYAASSLQSGVPSRFSGSGSGTDFTLTISSLQPEDFATYYCQQSYWYPLTFGQGTKLEIKRLGDYKDHDGDYKDHDIDYKDDDDKAAAHHHHHH

SEQ ID NO: 235 - protein, 275 aa, Artificial Sequence
  STAP2 (2) scFv antibody
EVQLLESGGGLVQPGGSLRLSCAASGFTFYGGSMYWVRQAPGKGLEWVSSISSGGSYTYYADSVKGRFTISRDNSKNTLYLQMNSLRAEDTAVYYCARVGYDTMDYWGQGTLVTVSSGGGGSGGGGSGGGGSDIQMTQSPSSLSASVGDRVTITCRASQSISSYLNWYQQKPGKAPKLLIYAASSLQSGVPSRFSGSGSGTDFTLTISSLQPEDFATYYCQQRWYWWYLFTFGQGTKLEIKRLGDYKDHDGDYKDHDIDYKDDDDKAAAHHHHHH

SEQ ID NO: 236 - protein, 274 aa, Artificial Sequence
  STAP2 (3) scFv antibody
EVQLLESGGGLVQPGGSLRLSCAASGFTFGYYGMGWVRQAPGKGLEWVSSIYSGYGSTSYADSVKGRFTISRDNSKNTLYLQMNSLRAEDTAVYYCARAAWSGYMDYWGQGTLVTVSSGGGGSGGGGSGGGGSDIQMTQSPSSLSASVGDRVTITCRASQSISSYLNWYQQKPGKAPKLLIYAASSLQSGVPSRFSGSGSGTDFTLTISSLQPEDFATYYCQQYSHYLLTFGQGTKLEIKRLGDYKDHDGDYKDHDIDYKDDDDKAAAHHHHHH

SEQ ID NO: 237 - protein, 275 aa, Artificial Sequence
  STAP2 (4) scFv antibody
EVQLLESGGGLVQPGGSLRLSCAASGFTFYYGGMSWVRQAPGKGLEWVSSIYYSSGSTSYADSVKGRFTISRDNSKNTLYLQMNSLRAEDTAVYYCARHGWDDNGFDYWGQGTLVTVSSGGGGSGGGGSGGGGSDIQMTQSPSSLSASVGDRVTITCRASQSISSYLNWYQQKPGKAPKLLIYAASSLQSGVPSRFSGSGSGTDFTLTISSLQPEDFATYYCQQVYSYLFTFGQGTKLEIKRLGDYKDHDGDYKDHDIDYKDDDDKAAAHHHHHH

SEQ ID NO: 238 - protein, 277 aa, Artificial Sequence
  STAT1 (1) scFv antibody
EVQLLESGGGLVQPGGSLRLSCAASGFTFGYYGMSWVRQAPGKGLEWVSGIYGSYYSTYYADSVKGRFTISRDNSKNTLYLQMNSLRAEDTAVYYCARHSWDYYFDYWGQGTLVTVSSGGGGSGGGGSGGGGSDIQMTQSPSSLSASVGDRVTITCRASQSISSYLNWYQQKPGKAPKLLIYAASSLQSGVPSRFSGSGSGTDFTLTISSLQPEDFATYYCQQYHYGYGSPYTFGQGTKLEIKRLGDYKDHDGDYKDHDIDYKDDDDKAAAHHHHHH

SEQ ID NO: 239 - protein, 276 aa, Artificial Sequence
  STAT1 (2) scFv antibody
EVQLLESGGGLVQPGGSLRLSCAASGFTFSYSSMYWVRQAPGKGLEWVSSISSYGHSTYYADSVKGRFTISRDNSKNTLYLQMNSLRAEDTAVYYCARSWGYYHYLDYWGQGTLVTVSSGGGGSGGGGSGGGGSDIQMTQSPSSLSASVGDRVTITCRASQSISSYLNWYQQKPGKAPKLLIYAASSLQSGVPSRFSGSGSGTDFTLTISSLQPEDFATYYCQQTWHPYPSTFGQGTKLEIKRLGDYKDHDGDYKDHDIDYKDDDDKAAAHHHHHH

SEQ ID NO: 240 - protein, 280 aa, Artificial Sequence
  TENS4 scFv antibody
EVQLLESGGGLVQPGGSLRLSCAASGFTFSGYSMSWVRQAPGKGLEWVSSISSGYYSTYYADSVKGRFTISRDNSKNTLYLQMNSLRAEDTAVYYCARVYWGSPWFNPAMDYWGQGTLVTVSSGGGGSGGGGSGGGGSDIQMTQSPSSLSASVGDRVTITCRASQSISSYLNWYQQKPGKAPKLLIYAASSLQSGVPSRFSGSGSGTDFTLTISSLQPEDFATYYCQQWYYWVPPTFGQGTKLEIKRLGDYKDHDGDYKDHDIDYKDDDDKAAAHHHHHH

SEQ ID NO: 241 - protein, 267 aa, Artificial Sequence
  TNFRSF14 (1) scFv antibody
  VARIANT 232: Any amino acid
  VARIANT 243: Any amino acid
  VARIANT 264: Any amino acid
EVQLLESGGGLVQPGGSLRLSCAASGFTFYSSGMYWVRQAPGKGLEWVSAISGSGGSTYYADSVKGRFTISRDNSKNTLYLQMNSLRAEDTAVYYCARHGYSYSFDYWGQGTLVTVSSGGGGSGGGGSGGGGSDIQMTQSPSSLSASVGDRVTITCRASQSISSYLNWYQQKPGKAPKLLIYAASSLQSGVPSRFSGSGSGTDFTLTISSLQPEDFATYYCQQGVFYPHTFXQGTKLEIKRLXDYKDHDGDYKDHDIDYKDDDXKAA

SEQ ID NO: 242 - protein, 307 aa, Artificial Sequence
  TNFRSF14 (2) scFv antibody
  VARIANT 249: Any amino acid
  VARIANT 256: Any amino acid
  VARIANT 266..269: Any amino acids
  VARIANT 271: Any amino acid
  VARIANT 274: Any amino acid
  VARIANT 285..287: Any amino acids
  VARIANT 292: Any amino acid
  VARIANT 297..300: Any amino acids
  VARIANT 302..307: Any amino acids
EVQLLESGGGLVQPGGSLRLSCAASGFTFSSYAMSWVRQAPGKGLEWVSAISGSGGSTYYADSVKGRFTISRDNSKNTLYLQMNSLRAEDTAVYYCARYVSHYTAHWYAYFDYWGQGTLVTVSSGGGGSGGGGSGGGGSDIQMTQSPSSLSASVGDRVTITCRASQSISSYLNWYQQKPGKAPKLLIYAASSLQSGVPSRFSGSGSGTDFTLTISSLQPEDFATYYCQQAGYHPLTFGQGTKLEIKRLXDYKDHDXDYKDHDIDYXXXXDXAAXHHHHHHSPRWXXXFALVXLRALXXXXFXXXXXX

SEQ ID NO: 243 - protein, 263 aa, Artificial Sequence
  TNFRSF3 (1) scFv antibody
  VARIANT 239..240: Any amino acids
EVQLLESGGGLVQPGGSLRLSCAASGFTFGSYSMSWVRQAPGKGLEWVSSISSYYGGTSYADSVKGRFTISRDNSKNTLYLQMNSLRAEDTAVYYCARGAYLDYWGQGTLVTVSSGGGGSGGGGSGGGGSDIQMTQSPSSLSASVGDRVTITCRASQSISSYLNWYQQKPGKAPKLLIYAASSLQSGVPSRFSGSGSGTDFTLTISSLQPEDFATYYCQQYYFPFTFGQGTKLEIKRLXXYKDHDGDYKDHDIDYKDDDDKAA

SEQ ID NO: 244 - protein, 266 aa, Artificial Sequence
  TNFRSF3 (2) scFv antibody
  VARIANT 242..243: Any amino acids
  VARIANT 258..260: Any amino acids
EVQLLESGGGLVQPGGSLRLSCAASGFTFGSSYMYWVRQAPGKGLEWVSSIYGSSSSTSYADSVKGRFTISRDNSKNTLYLQMNSLRAEDTAVYYCARGYYWDYMDYWGQGTLVTVSSGGGGSGGGGSGGGGSDIQMTQSPSSLSASVGDRVTITCRASQSISSYLNWYQQKPGKAPKLLIYAASSLQSGVPSRFSGSGSGTDFTLTISSLQPEDFATYYCQQAWDLPTFGQGTKLEIKRLXXYKDHDGDYKDHDIDXXXTMTRRP

SEQ ID NO: 245 - protein, 267 aa, Artificial Sequence
  TNFRSF3 (3) scFv antibody
  VARIANT 243: Any amino acid
  VARIANT 258: Any amino acid
  VARIANT 265: Any amino acid
EVQLLESGGGLVQPGGSLRLSCAASGFTFSSYAMSWVRQAPGKGLEWVSAISGSGGSTYYADSVKGRFTISRDNSKNTLYLQMNSLRAEDTAVYYCARYYWGWYFDYWGQGTLVTVSSGGGGSGGGGSGGGGSDIQMTQSPSSLSASVGDRVTITCRASQSISSYLNWYQQKPGKAPKLLIYAASSLQSGVPSRFSGSGSGTDFTLTISSLQPEDFATYYCQQGWWYPLTFGQGTKLEIKRLXDYKDHDGDYKDHDIXYKDDDDXAA

SEQ ID NO: 246 - protein, 271 aa, Artificial Sequence
  UBC9 (1) scFv antibody
EVQLLESGGGLVQPGGSLRLSCAASGFTFGYGSMSWVRQAPGKGLEWVSSISYYGSSTGYADSVKGRFTISRDNSKNTLYLQMNSLRAEDTAVYYCARGVVWLDYWGQGTLVTVSSGGGGSGGGGSGGGGSDIQMTQSPSSLSASVGDRVTITCRASQSISSYLNWYQQKPGKAPKLLIYAASSLQSGVPSRFSGSGSGTDFTLTISSLQPEDFATYYCQQGPYPPTFGQGTKLEIKRLGDYKDHDGDYKDHDIDYKDDDDKAAAHHHHHH

SEQ ID NO: 247 - protein, 278 aa, Artificial Sequence
  UBC9 (2) scFv antibody
EVQLLESGGGLVQPGGSLRLSCAASGFTFYGSSMSWVRQAPGKGLEWVSGISYSSSYTSYADSVKGRFTISRDNSKNTLYLQMNSLRAEDTAVYYCARATSYWFTYFGVIDYWGQGTLVTVSSGGGGSGGGGSGGGGSDIQMTQSPSSLSASVGDRVTITCRASQSISSYLNWYQQKPGKAPKLLIYAASSLQSGVPSRFSGSGSGTDFTLTISSLQPEDFATYYCQQSWSPHTFGQGTKLEIKRLGDYKDHDGDYKDHDIDYKDDDDKAAAHHHHHH

SEQ ID NO: 248 - protein, 275 aa, Artificial Sequence
  UBC9 (3) scFv antibody
EVQLLESGGGLVQPGGSLRLSCAASGFTFSSYAMSWVRQAPGKGLEWVSSIYGSSSYTYYADSVKGRFTISRDNSKNTLYLQMNSLRAEDTAVYYCARSASWGGYFDYWGQGTLVTVSSGGGGSGGGGSGGGGSDIQMTQSPSSLSASVGDRVTITCRASQSISSYLNWYQQKPGKAPKLLIYAASSLQSGVPSRFSGSGSGTDFTLTISSLQPEDFATYYCQQSGVSPYTFGQGTKLEIKRLGDYKDHDGDYKDHDIDYKDDDDKAAAHHHHHH

SEQ ID NO: 249 - protein, 277 aa, Artificial Sequence
  UBE2C (1) scFv antibody
EVQLLESGGGLVQPGGSLRLSCAASGFTFGYYSMSWVRQAPGKGLEWVSAISGSGGSTYYADSVKGRFTISRDNSKNTLYLQMNSLRAEDTAVYYCARGGFWYGGYMDYWGQGTLVTVSSGGGGSGGGGSGGGGSDIQMTQSPSSLSASVGDRVTITCRASQSISSYLNWYQQKPGKAPKLLIYAASSLQSGVPSRFSGSGSGTDFTLTISSLQPEDFATYYCQQSSGPHPFTFGQGTKLEIKRLGDYKDHDGDYKDHDIDYKDDDDKAAAHHHHHH

SEQ ID NO: 250 - protein, 273 aa, Artificial Sequence
  UBE2C (2) scFv antibody
EVQLLESGGGLVQPGGSLRLSCAASGFTFSSYSMSWVRQAPGKGLEWVSSISGYSYGTYYADSVKGRFTISRDNSKNTLYLQMNSLRAEDTAVYYCARWHHPYYFDYWGQGTLVTVSSGGGGSGGGGSGGGGSDIQMTQSPSSLSASVGDRVTITCRASQSISSYLNWYQQKPGKAPKLLIYAASSLQSGVPSRFSGSGSGTDFTLTISSLQPEDFATYYCQQGSVLSTFGQGTKLEIKRLGDYKDHDGDYKDHDIDYKDDDDKAAAHHHHHH

SEQ ID NO: 251 - protein, 270 aa, Artificial Sequence
  UCHL5 scFv antibody
EVQLLESGGGLVQPGGSLRLSCAASGFTFSSYAMSWVRQAPGKGLEWVSAISGSGGSTYYADSVKGRFTISRDNSKNTLYLQMNSLRAEDTAVYYCARGWSLDYWGQGTLVTVSSGGGGSGGGGSGGGGSDIQMTQSPSSLSASVGDRVTITCRASQSISSYLNWYQQKPGKAPKLLIYAASSLQSGVPSRFSGSGSGTDFTLTISSLQPEDFATYYCQQVHFLPTFGQGTKLEIKRLGDYKDHDGDYKDHDIDYKDDDDKAAAHHHHHH

SEQ ID NO: 252 - protein, 276 aa, Artificial Sequence
  Her2/ErbB22 (4) scFv antibody
EVQLVESGGGLVQPGGSLRLSCAASGFNIKDTYIHWVRQAPGKGLEWVARIYPTNGYTRYADSVKGRFTISADTSKNTAYLQMNSLRAEDTAVYYCSRWGGDGFYAMDYWGQGTLVTVSSGGGGSGGGGSGGGGSDIQMTQSPSSLSASVGDRVTITCRASQDVNTAVAWYQQKPGKAPKLLIYSASFLYSGVPSRFSGSRSGTDFTLTISSLQPEDFATYYCQQHYTTPPTFGQGTKVEIKRLGDYKDHDGDYKDHDIDYKDDDDKAAAHHHHHH

SEQ ID NO: 253 - protein, 274 aa, Artificial Sequence
  EGFR scFv antibody
QVQLKQSGPGLVQPSQSLSITCTVSGFSLTNYGVHWVRQSPGKGLEWLGVIWSGGNTDYNTPFTSRLSINKDNSKSQVFFKMNSLQSNDTAIYYCARALTYYDYEFAYWGQGTLVTVSSGGGGSGGGGSGGGGSDILLTQSPVILSVSPGERVSFSCRASQSIGTNIHWYQQRTNGSPRLLIKYASESISGIPSRFSGSGSGTDFTLSINSVESEDIADYYCQQNNNWPTTFGAGTKLELKLGDYKDHDGDYKDHDIDYKDDDDKAAAHHHHHH

SEQ ID NO: 254 - protein, 275 aa, Artificial Sequence
  CHP-1 (1) scFv antibody
EVQLLESGGGLVQPGGSLRLSCAASGFTFYYYGMSWVRQAPGKGLEWVSGIGYGYGTYADSVKGRFTISRDNSKNTLYLQMNSLRAEDTAVYYCARDSYSSPYYSLDYWGQGTLVTVSSGGGGSGGGGSGGGGSDIQMTQSPSSLSASVGDRVTITCRASQSISSYLNWYQQKPGKAPKLLIYAASSLQSGVPSRFSGSGSGTDFTLTISSLQPEDFATYYCQQSYSTPYTFGQGTKLEIKRLGDYKDHDGDYKDHDIDYKDDDDKAAAHHHHHH

SEQ ID NO: 255 - protein, 276 aa, Artificial Sequence
  CHP-1 (2) scFv antibody
EVQLLESGGGLVQPGGSLRLSCAASGFTFYSYSMGWVRQAPGKGLEWVSSIGGSGYYTYYADSVKGRFTISRDNSKNTLYLQMNSLRAEDTAVYYCARNYNYYYGSYIDYWGQGTLVTVSSGGGGSGGGGSGGGGSDIQMTQSPSSLSASVGDRVTITCRASQSISSYLNWYQQKPGKAPKLLIYAASSLQSGVPSRFSGSGSGTDFTLTISSLQPEDFATYYCQQSFYPHTFGQGTKLEIKRLGDYKDHDGDYKDHDIDYKDDDDKAAAHHHHHH

SEQ ID NO: 256 - protein, 277 aa, Artificial Sequence
  AGAP-2 (1) scFv antibody
EVQLLESGGGLVQPGGSLRLSCAASGFTFGSYSMHWVRQAPGKGLEWVSSISSYSYSTYYADSVKGRFTISRDNSKNTLYLQMNSLRAEDTAVYYCARGGAYYTNPFDYWGQGTLVTVSSGGGGSGGGGSGGGGSDIQMTQSPSSLSASVGDRVTITCRASQSISSYLNWYQQKPGKAPKLLIYAASSLQSGVPSRFSGSGSGTDFTLTISSLQPEDFATYYCQQPGFYSLPTFGQGTKLEIKRLGDYKDHDGDYKDHDIDYKDDDDKAAAHHHHHH

SEQ ID NO: 257 - protein, 274 aa, Artificial Sequence
  AGAP-2 (2) scFv antibody
EVQLLESGGGLVQPGGSLRLSCAASGFTFSSYYMYWVRQAPGKGLEWVSGISGYSYSTGYADSVKGRFTISRDNSKNTLYLQMNSLRAEDTAVYYCARYGYGSSFDYWGQGTLVTVSSGGGGSGGGGSGGGGSDIQMTQSPSSLSASVGDRVTITCRASQSISSYLNWYQQKPGKAPKLLIYAASSLQSGVPSRFSGSGSGTDFTLTISSLQPEDFATYYCQQGSYDPHTFGQGTKLEIKRLGDYKDHDGDYKDHDIDYKDDDDKAAAHHHHHH

SEQ ID NO: 258 - protein, 277 aa, Artificial Sequence
  AGAP-2 (3) scFv antibody
EVQLLESGGGLVQPGGSLRLSCAASGFTFGGYSMYWVRQAPGKGLEWVSYISSGSSSTYYADSVKGRFTISRDNSKNTLYLQMNSLRAEDTAVYYCARGGGWYDYDFFDYWGQGTLVTVSSGGGGSGGGGSGGGGSDIQMTQSPSSLSASVGDRVTITCRASQSISSYLNWYQQKPGKAPKLLIYAASSLQSGVPSRFSGSGSGTDFTLTISSLQPEDFATYYCQQSYSTPYTFGQGTKLEIKRLGDYKDHDGDYKDHDIDYKDDDDKAAAHHHHHH

SEQ ID NO: 259 - protein, 277 aa, Artificial Sequence
  AGAP-2 (4) scFv antibody
EVQLLESGGGLVQPGGSLRLSCAASGFTFSSYAMSWVRQAPGKGLEWVSAISGSGGSTYYADSVKGRFTISRDNSKNTLYLQMNSLRAEDTAVYYCARSSDYFYYSYLDYWGQGTLVTVSSGGGGSGGGGSGGGGSDIQMTQSPSSLSASVGDRVTITCRASQSISSYLNWYQQKPGKAPKLLIYAASSLQSGVPSRFSGSGSGTDFTLTISSLQPEDFATYYCQQGWYYPFTFGQGTKLEIKRLGDYKDHDGDYKDHDIDYKDDDDKAAAHHHHHH

SEQ ID NO: 260 - protein, 273 aa, Artificial Sequence
  MAPK-9 (1) scFv antibody
EVQLLESGGGLVQPGGSLRLSCAASGFTFYYSSMSWVRQAPGKGLEWVSSIYGGGGSTSYADSVKGRFTISRDNSKNTLYLQMNSLRAEDTAVYYCARGPGHVIDYWGQGTLVTVSSGGGGSGGGGSGGGGSDIQMTQSPSSLSASVGDRVTITCRASQSISSYLNWYQQKPGKAPKLLIYAASSLQSGVPSRFSGSGSGTDFTLTISSLQPEDFATYYCQQSYYVPFTFGQGTKLEIKRLGDYKDHDGDYKDHDIDYKDDDDKAAAHHHHHH

SEQ ID NO: 261 - protein, 273 aa, Artificial Sequence
  MAPK-9 (2) scFv antibody
EVQLLESGGGLVQPGGSLRLSCAASGFTFSSYAMSWVRQAPGKGLEWVSAISGSGGSTYYADSVKGRFTISRDNSKNTLYLQMNSLRAEDTAVYYCARSHTVYFDYWGQGTLVTVSSGGGGSGGGGSGGGGSDIQMTQSPSSLSASVGDRVTITCRASQSISSYLNWYQQKPGKAPKLLIYAASSLQSGVPSRFSGSGSGTDFTLTISSLQPEDFATYYCQQSYSTPYTFGQGTKLEIKRLGDYKDHDGDYKDHDIDYKDDDDKAAAHHHHHH

SEQ ID NO: 262 - protein, 273 aa, Artificial Sequence
  MAPK-9 (3) scFv antibody
EVQLLESGGGLVQPGGSLRLSCAASGFTFGSSGMSWVRQAPGKGLEWVSGIYGSSYGTGYADSVKGRFTISRDNSKNTLYLQMNSLRAEDTAVYYCARGFGYHIDYWGQGTLVTVSSGGGGSGGGGSGGGGSDIQMTQSPSSLSASVGDRVTITCRASQSISSYLNWYQQKPGKAPKLLIYAASSLQSGVPSRFSGSGSGTDFTLTISSLQPEDFATYYCQQYGSSLPTFGQGTKLEIKRLGDYKDHDGDYKDHDIDYKDDDDKAAAHHHHHH

SEQ ID NO: 263 - protein, 273 aa, Artificial Sequence
  MAPK-9 (4) scFv antibody
EVQLLESGGGLVQPGGSLRLSCAASGFTFSGGSMSWVRQAPGKGLEWVSSISSSGSSTYYADSVKGRFTISRDNSKNTLYLQMNSLRAEDTAVYYCARAYYPNFDYWGQGTLVTVSSGGGGSGGGGSGGGGSDIQMTQSPSSLSASVGDRVTITCRASQSISSYLNWYQQKPGKAPKLLIYAASSLQSGVPSRFSGSGSGTDFTLTISSLQPEDFATYYCQQSYSTPYTFGQGTKLEIKRLGDYKDHDGDYKDHDIDYKDDDDKAAAHHHHHH

SEQ ID NO: 264 - protein, 275 aa, Artificial Sequence
  MAPK-9 (5) scFv antibody
EVQLLESGGGLVQPGGSLRLSCAASGFTFSSYAMSWVRQAPGKGLEWVSGISSYGGSTSYADSVKGRFTISRDNSKNTLYLQMNSLRAEDTAVYYCARFGHAFPAFDYWGQGTLVTVSSGGGGSGGGGSGGGGSDIQMTQSPSSLSASVGDRVTITCRASQSISSYLNWYQQKPGKAPKLLIYAASSLQSGVPSRFSGSGSGTDFTLTISSLQPEDFATYYCQQSYSTPYTFGQGTKLEIKRLGDYKDHDGDYKDHDIDYKDDDDKAAAHHHHHH

SEQ ID NO: 265 - protein, 273 aa, Artificial Sequence
  MAPK-9 (6) scFv antibody
EVQLLESGGGLVQPGGSLRLSCAASGFTFSYGSMSWVRQAPGKGLEWVSAISGSGGSTYYADSVKGRFTISRDNSKNTLYLQMNSLRAEDTAVYYCARGHGSNIDYWGQGTLVTVSSGGGGSGGGGSGGGGSDIQMTQSPSSLSASVGDRVTITCRASQSISSYLNWYQQKPGKAPKLLIYAASSLQSGVPSRFSGSGSGTDFTLTISSLQPEDFATYYCQQSYSTPYTFGQGTKLEIKRLGDYKDHDGDYKDHDIDYKDDDDKAAAHHHHHH

SEQ ID NO: 266 - protein, 273 aa, Artificial Sequence
  PAK-7 (1) scFv antibody
  VARIANT 228: Any amino acid
EVQLLESGGGLVQPGGSLRLSCAASGFTFSGYSMSWVRQAPGKGLEWVSSISSSYSSTYYADSVKGRFTISRDNSKNTLYLQMNSLRAEDTAVYYCARGSFGFDYWGQGTLVTVSSGGGGSGGGGSGGGGSDIQMTQSPSSLSASVGDRVTITCRASQSISSYLNWYQQKPGKAPKLLIYAASSLQSGVPSRFSGSGSGTDFTLTISSLQPEDFATYYCQQYYYGVLXTFGQGTKLEIKRLGDYKDHDGDYKDHDIDYKDDDDKAAAHHHHHH

SEQ ID NO: 267 - protein, 272 aa, Artificial Sequence
  PAK-7 (2) scFv antibody
EVQLLESGGGLVQPGGSLRLSCAASGFTFYYSSMSWVRQAPGKGLEWVSGISGGYSSTYYADSVKGRFTISRDNSKNTLYLQMNSLRAEDTAVYYCARGFGVMDYWGQGTLVTVSSGGGGSGGGGSGGGGSDIQMTQSPSSLSASVGDRVTITCRASQSISSYLNWYQQKPGKAPKLLIYAASSLQSGVPSRFSGSGSGTDFTLTISSLQPEDFATYYCQQSYSTPYTFGQGTKLEIKRLGDYKDHDGDYKDHDIDYKDDDDKAAAHHHHHH

SEQ ID NO: 268 - protein, 272 aa, Artificial Sequence
  PAK-7 (3) scFv antibody
EVQLLESGGGLVQPGGSLRLSCAASGFTFSSYAMSWVRQAPGKGLEWVSYIYGPYSYTSYADSVKGRFTISRDNSKNTLYLQMNSLRAEDTAVYYCARGGYVFDYWGQGTLVTVSSGGGGSGGGGSGGGGSDIQMTQSPSSLSASVGDRVTITCRASQSISSYLNWYQQKPGKAPKLLIYAASSLQSGVPSRFSGSGSGTDFTLTISSLQPEDFATYYCQQSYSTPYTFGQGTKLEIKRLGDYKDHDGDYKDHDIDYKDDDDKAAAHHHHHH

SEQ ID NO: 269 - protein, 277 aa, Artificial Sequence
  GEM (1) scFv antibody
EVQLLESGGGLVQPGGSLRLSCAASGFTFYYSYMYWVRQAPGKGLEWVSAISGSGGSTYYADSVKGRFTISRDNSKNTLYLQMNSLRAEDTAVYYCARFYYYGFNGSFDYWGQGTLVTVSSGGGGSGGGGSGGGGSDIQMTQSPSSLSASVGDRVTITCRASQSISSYLNWYQQKPGKAPKLLIYAASSLQSGVPSRFSGSGSGTDFTLTISSLQPEDFATYYCQQSYSTPYTFGQGTKLEIKRLGDYKDHDGDYKDHDIDYKDDDDKAAAHHHHHH

SEQ ID NO: 270 - protein, 276 aa, Artificial Sequence
  GEM (2) scFv antibody
EVQLLESGGGLVQPGGSLRLSCAASGFTFYGSYMGWVRQAPGKGLEWVSGISSYSYSTYYADSVKGRFTISRDNSKNTLYLQMNSLRAEDTAVYYCARYSPFHWYFDYWGQGTLVTVSSGGGGSGGGGSGGGGSDIQMTQSPSSLSASVGDRVTITCRASQSISSYLNWYQQKPGKAPKLLIYAASSLQSGVPSRFSGSGSGTDFTLTISSLQPEDFATYYCQQSFRDPPHTFGQGTKLEIKRLGDYKDHDGDYKDHDIDYKDDDDKAAAHHHHHH

SEQ ID NO: 271 - protein, 276 aa, Artificial Sequence
  GNAI-3 (1) scFv antibody
EVQLLESGGGLVQPGGSLRLSCAASGFTFSSYAMSWVRQAPGKGLEWVSYISGGYGYTSYADSVKGRFTISRDNSKNTLYLQMNSLRAEDTAVYYCARVVYDSSYFDYWGQGTLVTVSSGGGGSGGGGSGGGGSDIQMTQSPSSLSASVGDRVTITCRASQSISSYLNWYQQKPGKAPKLLIYAASSLQSGVPSRFSGSGSGTDFTLTISSLQPEDFATYYCQQAYYGFPSTFGQGTKLEIKRLGDYKDHDGDYKDHDIDYKDDDDKAAAHHHHHH

SEQ ID NO: 272 - protein, 274 aa, Artificial Sequence
  GNAI-3 (2) scFv antibody
EVQLLESGGGLVQPGGSLRLSCAASGFTFSSSSMSWVRQAPGKGLEWVSGISGYGGGTGYADSVKGRFTISRDNSKNTLYLQMNSLRAEDTAVYYCARSSYFVYFDYWGQGTLVTVSSGGGGSGGGGSGGGGSDIQMTQSPSSLSASVGDRVTITCRASQSISSYLNWYQQKPGKAPKLLIYAASSLQSGVPSRFSGSGSGTDFTLTISSLQPEDFATYYCQQPYGYPYTFGQGTKLEIKRLGDYKDHDGDYKDHDIDYKDDDDKAAAHHHHHH

SEQ ID NO: 273 - protein, 276 aa, Artificial Sequence
  GNAI-3 (3) scFv antibody
EVQLLESGGGLVQPGGSLRLSCAASGFTFYSSGMGWVRQAPGKGLEWVSSIGSSSGYTYYADSVKGRFTISRDNSKNTLYLQMNSLRAEDTAVYYCARVVWYDGGFDYWGQGTLVTVSSGGGGSGGGGSGGGGSDIQMTQSPSSLSASVGDRVTITCRASQSISSYLNWYQQKPGKAPKLLIYAASSLQSGVPSRFSGSGSGTDFTLTISSLQPEDFATYYCQQSPYYYLPTFGQGTKLEIKRLGDYKDHDGDYKDHDIDYKDDDDKAAAHHHHHH

SEQ ID NO: 274 - protein, 277 aa, Artificial Sequence
  GNAI-3 (4) scFv antibody
EVQLLESGGGLVQPGGSLRLSCAASGFTFSSSYMYWVRQAPGKGLEWVSSISSGYSSTYYADSVKGRFTISRDNSKNTLYLQMNSLRAEDTAVYYCARDVSHGGHSFLDYWGQGTLVTVSSGGGGSGGGGSGGGGSDIQMTQSPSSLSASVGDRVTITCRASQSISSYLNWYQQKPGKAPKLLIYAASSLQSGVPSRFSGSGSGTDFTLTISSLQPEDFATYYCQQADYYPPTFGQGTKLEIKRLGDYKDHDGDYKDHDIDYKDDDDKAAAHHHHHH

SEQ ID NO: 275 - protein, 271 aa, Artificial Sequence
  MAP2K-6 (1) scFv antibody
EVQLLESGGGLVQPGGSLRLSCAASGFTFYSYGMGWVRQAPGKGLEWVSYIYGSYGYTYYADSVKGRFTISRDNSKNTLYLQMNSLRAEDTAVYYCARSSYFDYWGQGTLVTVSSGGGGSGGGGSGGGGSDIQMTQSPSSLSASVGDRVTITCRASQSISSYLNWYQQKPGKAPKLLIYAASSLQSGVPSRFSGSGSGTDFTLTISSLQPEDFATYYCQQSYSTPYTFGQGTKLEIKRLGDYKDHDGDYKDHDIDYKDDDDKAAAHHHHHH

SEQ ID NO: 276 - protein, 276 aa, Artificial Sequence
  MAP2K-6 (2) scFv antibody
EVQLLESGGGLVQPGGSLRLSCAASGFTFSSSSMHWVRQAPGKGLEWVSSISGYGYYTYYADSVKGRFTISRDNSKNTLYLQMNSLRAEDTAVYYCARYSYSPSAYYFDYWGQGTLVTVSSGGGGSGGGGSGGGGSDIQMTQSPSSLSASVGDRVTITCRASQSISSYLNWYQQKPGKAPKLLIYAASSLQSGVPSRFSGSGSGTDFTLTISSLQPEDFATYYCQQGYYLPTFGQGTKLEIKRLGDYKDHDGDYKDHDIDYKDDDDKAAAHHHHHH

SEQ ID NO: 277 - protein, 275 aa, Artificial Sequence
  MAP2K-6 (3) scFv antibody
EVQLLESGGGLVQPGGSLRLSCAASGFTFYGSSMSWVRQAPGKGLEWVSGISGYGYYTSYADSVKGRFTISRDNSKNTLYLQMNSLRAEDTAVYYCARYSASGFYFDYWGQGTLVTVSSGGGGSGGGGSGGGGSDIQMTQSPSSLSASVGDRVTITCRASQSISSYLNWYQQKPGKAPKLLIYAASSLQSGVPSRFSGSGSGTDFTLTISSLQPEDFATYYCQQSYVYPLTFGQGTKLEIKRLGDYKDHDGDYKDHDIDYKDDDDKAAAHHHHHH

SEQ ID NO: 278 - protein, 275 aa, Artificial Sequence
  MAP2K-6 (4) scFv antibody
EVQLLESGGGLVQPGGSLRLSCAASGFTFSSYSMGWVRQAPGKGLEWVSGISSYGYYTYYADSVKGRFTISRDNSKNTLYLQMNSLRAEDTAVYYCARHYTTGYYIDYWGQGTLVTVSSGGGGSGGGGSGGGGSDIQMTQSPSSLSASVGDRVTITCRASQSISSYLNWYQQKPGKAPKLLIYAASSLQSGVPSRFSGSGSGTDFTLTISSLQPEDFATYYCQQGFNVPYTFGQGTKLEIKRLGDYKDHDGDYKDHDIDYKDDDDKAAAHHHHHH

SEQ ID NO: 279 - protein, 275 aa, Artificial Sequence
  MAP2K-2 (1) scFv antibody
EVQLLESGGGLVQPGGSLRLSCAASGFTFSSSYMYWVRQAPGKGLEWVSSISGGGYGTYYADSVKGRFTISRDNSKNTLYLQMNSLRAEDTAVYYCARAYPYVGSGIDYWGQGTLVTVSSGGGGSGGGGSGGGGSDIQMTQSPSSLSASVGDRVTITCRASQSISSYLNWYQQKPGKAPKLLIYAASSLQSGVPSRFSGSGSGTDFTLTISSLQPEDFATYYCQQGYSLPTFGQGTKLEIKRLGDYKDHDGDYKDHDIDYKDDDDKAAAHHHHHH

SEQ ID NO: 280 - protein, 273 aa, Artificial Sequence
  MAP2K-2 (2) scFv antibody
EVQLLESGGGLVQPGGSLRLSCAASGFTFYYSYMGWVRQAPGKGLEWVSSISGSSYGTSYADSVKGRFTISRDNSKNTLYLQMNSLRAEDTAVYYCARGTGSVIDYWGQGTLVTVSSGGGGSGGGGSGGGGSDIQMTQSPSSLSASVGDRVTITCRASQSISSYLNWYQQKPGKAPKLLIYAASSLQSGVPSRFSGSGSGTDFTLTISSLQPEDFATYYCQQSYSTPYTFGQGTKLEIKRLGDYKDHDGDYKDHDIDYKDDDDKAAAHHHHHH

SEQ ID NO: 281 - protein, 273 aa, Artificial Sequence
  MAP2K-2 (3) scFv antibody
EVQLLESGGGLVQPGGSLRLSCAASGFTFSGYYMSWVRQAPGKGLEWVSSISSGGYGTGYADSVKGRFTISRDNSKNTLYLQMNSLRAEDTAVYYCARYGPYSLDYWGQGTLVTVSSGGGGSGGGGSGGGGSDIQMTQSPSSLSASVGDRVTITCRASQSISSYLNWYQQKPGKAPKLLIYAASSLQSGVPSRFSGSGSGTDFTLTISSLQPEDFATYYCQQGAYYLFTFGQGTKLEIKRLGDYKDHDGDYKDHDIDYKDDDDKAAAHHHHHH

SEQ ID NO: 282 - protein, 272 aa, Artificial Sequence
  KRAS scFv antibody
EVQLLESGGGLVQPGGSLRLSCAASGFTFSGSYMYWVRQAPGKGLEWVSSIGSSYGYTYYADSVKGRFTISRDNSKNTLYLQMNSLRAEDTAVYYCARYGYFSFDYWGQGTLVTVSSGGGGSGGGGSGGGGSDIQMTQSPSSLSASVGDRVTITCRASQSISSYLNWYQQKPGKAPKLLIYAASSLQSGVPSRFSGSGSGTDFTLTISSLQPEDFATYYCQQDHYLSTFGQGTKLEIKRLGDYKDHDGDYKDHDIDYKDDDDKAAAHHHHHH

SEQ ID NO: 283 - protein, 274 aa, Artificial Sequence
  PTPRO (1) scFv antibody
  VARIANT 163..164: Any amino acids
  VARIANT 185: Any amino acid
EVQLLESGGGLVQPGGSLRLSCAASGFTFSYSGMGWVRQAPGKGLEWVSYISSYGYSTYYADSVKGRFTISRDNSKNTLYLQMNSLRAEDTAVYYCARSVSGGVIDYWGQGTLVTVSSGGGGSGGGGSGGGGSDIQMTQSPSSLSASVGDRVTITCRASQSIXXYLNWYQQKPGKAPKLLIYAAXSLQSGVPSRFSGSGSGTDFTLTISSLQPEDFATYYCQQWVHYPYTFGQGTKLEIKRLGDYKDHDGDYKDHDIDYKDDDDKAAAHHHHHH

SEQ ID NO: 284 - protein, 276 aa, Artificial Sequence
  PTPRO (2) scFv antibody
EVQLLESGGGLVQPGGSLRLSCAASGFTFSSYAMSWVRQAPGKGLEWVSAISGSGGSTYYADSVKGRFTISRDNSKNTLYLQMNSLRAEDTAVYYCARWGPWYAMDYWGQGTLVTVSSGGGGSGGGGSGGGGSDIQMTQSPSSLSASVGDRVTITCRASQSISSYLNWYQQKPGKAPKLLIYAASSLQSGVPSRFSGSGSGTDFTLTISSLQPEDFATYYCQQSHWSTWLHTFGQGTKLEIKRLGDYKDHDGDYKDHDIDYKDDDDKAAAHHHHHH

SEQ ID NO: 285 - protein, 276 aa, Artificial Sequence
  PTPRO (3) scFv antibody
  VARIANT 226: Any amino acid
  VARIANT 228..229: Any amino acids
EVQLLESGGGLVQPGGSLRLSCAASGFTFSGSYMYWVRQAPGKGLEWVSSISSGGYSKYYADSVKGRFTISRDNSKNTLYLQMNSLRAEDTAVYYCARWDYGHSHAFDYWGQGTLVTVSSGGGGSGGGGSGGGGSDIQMTQSPSSLSASVGDRVTITCRASQSISSYLNWYQQKPGKAPKLLIYAASSLQSGVPSRFSGSGSGTDFTLTISSLQPEDFATYYCQQXSXXPSTFGQGTKLEIKRLGDYKDHDGDYKDHDIDYKDDDDKAAAHHHHHH

SEQ ID NO: 286 - protein, 273 aa, Artificial Sequence
  PTPRO (4) scFv antibody
  VARIANT 34: Any amino acid
EVQLLESGGGLVQPGGSLRLSCAASGFTFSGYYXSWVRQAPGKGLEWVSSISGGSYSKSYADSVKGRFTISRDNSKNTLYLQMNSLRAEDTAVYYCARYSYYFDYWGQGTLVTVSSGGGGSGGGGSGGGGSDIQMTQSPSSLSASVGDRVTITCRASQSISSYLNWYQQKPGKAPKLLIYAASSLQSGVPSRFSGSGSGTDFTLTISSLQPEDFATYYCQQYAAYGLLTFGQGTKLEIKRLGDYKDHDGDYKDHDIDYKDDDDKAAAHHHHHH

SEQ ID NO: 287 - protein, 282 aa, Artificial Sequence
  PAR-6B (1) scFv antibody
EVQLLESGGGLVQPGGSLRLSCAASGFTFSSYAMSWVRQAPGKGLEWVSAISGSGGSTYYADSVKGRFTISRDNSKNTLYLQMNSLRAEDTAVYYCARWNVWGHWGGPYSGVGLDYWGQGTLVTVSSGGGGSGGGGSGGGGSDIQMTQSPSSLSASVGDRVTITCRASQSISSYLNWYQQKPGKAPKLLIYAASSLQSGVPSRFSGSGSGTDFTLTISSLQPEDFATYYCQQPYYPFTFGQGTKLEIKRLGDYKDHDGDYKDHDIDYKDDDDKAAAHHHHHH

SEQ ID NO: 288 - protein, 273 aa, Artificial Sequence
  PAR-6B (2) scFv antibody
EVQLLESGGGLVQPGGSLRLSCAASGFTFSYYYMYWVRQAPGKGLEWVSYIYSYYYGTYYADSVKGRFTISRDNSKNTLYLQMNSLRAEDTAVYYCARYAYYLDYWGQGTLVTVSSGGGGSGGGGSGGGGSDIQMTQSPSSLSASVGDRVTITCRASQSISSYLNWYQQKPGKAPKLLIYAASSLQSGVPSRFSGSGSGTDFTLTISSLQPEDFATYYCQQHWSYGLYTFGQGTKLEIKRLGDYKDHDGDYKDHDIDYKDDDDKAAAHHHHHH

SEQ ID NO: 289 - protein, 276 aa, Artificial Sequence
  PRD-14 (1) scFv antibody
EVQLLESGGGLVQPGGSLRLSCAASGFTFGSYGMSWVRQAPGKGLEWVSSIYSGYSYTYYADSVKGRFTISRDNSKNTLYLQMNSLRAEDTAVYYCARHGPYRGPGSMDYWGQGTLVTVSSGGGGSGGGGSGGGGSDIQMTQSPSSLSASVGDRVTITCRASQSISSYLNWYQQKPGKAPKLLIYAASSLQSGVPSRFSGSGSGTDFTLTISSLQPEDFATYYCQQSWWLLTFGQGTKLEIKRLGDYKDHDGDYKDHDIDYKDDDDKAAAHHHHHH

SEQ ID NO: 290 - protein, 273 aa, Artificial Sequence
  PRD-14 (2) scFv antibody
EVQLLESGGGLVQPGGSLRLSCAASGFTFYSGGMSWVRQAPGKGLEWVSSISGGYYYTYYADSVKGRFTISRDNSKNTLYLQMNSLRAEDTAVYYCARYVYGVGIDYWGQGTLVTVSSGGGGSGGGGSGGGGSDIQMTQSPSSLSASVGDRVTITCRASQSISSYLNWYQQKPGKAPKLLIYAASSLQSGVPSRFSGSGSGTDFTLTISSLQPEDFATYYCQQGYWLFTFGQGTKLEIKRLGDYKDHDGDYKDHDIDYKDDDDKAAAHHHHHH

SEQ ID NO: 291 - protein, 273 aa, Artificial Sequence
  PRD-14 (3) scFv antibody
EVQLLESGGGLVQPGGSLRLSCAASGFTFSGYSMYWVRQAPGKGLEWVSSIYGYYGGTSYADSVKGRFTISRDNSKNTLYLQMNSLRAEDTAVYYCARGHPWFYMDYWGQGTLVTVSSGGGGSGGGGSGGGGSDIQMTQSPSSLSASVGDRVTITCRASQSISSYLNWYQQKPGKAPKLLIYAASSLQSGVPSRFSGSGSGTDFTLTISSLQPEDFATYYCQQSYWLYTFGQGTKLEIKRLGDYKDHDGDYKDHDIDYKDDDDKAAAHHHHHH

SEQ ID NO: 292 - protein, 274 aa, Artificial Sequence
  PRD-14 (4) scFv antibody
EVQLLESGGGLVQPGGSLRLSCAASGFTFSGSSMSWVRQAPGKGLEWVSSIYYSYGYTYYADSVKGRFTISRDNSKNTLYLQMNSLRAEDTAVYYCARVGPWANYMDYWGQGTLVTVSSGGGGSGGGGSGGGGSDIQMTQSPSSLSASVGDRVTITCRASQSISSYLNWYQQKPGKAPKLLIYAASSLQSGVPSRFSGSGSGTDFTLTISSLQPEDFATYYCQQSWSPHTFGQGTKLEIKRLGDYKDHDGDYKDHDIDYKDDDDKAAAHHHHHH

SEQ ID NO: 293 - protein, 271 aa, Artificial Sequence
  PRD-14 (5) scFv antibody
EVQLLESGGGLVQPGGSLRLSCAASGFTFSSYAMSWVRQAPGKGLEWVSGIYGYYGSTGYADSVKGRFTISRDNSKNTLYLQMNSLRAEDTAVYYCARGSNVLDYWGQGTLVTVSSGGGGSGGGGSGGGGSDIQMTQSPSSLSASVGDRVTITCRASQSISSYLNWYQQKPGKAPKLLIYAASSLQSGVPSRFSGSGSGTDFTLTISSLQPEDFATYYCQQGYGLSTFGQGTKLEIKRLGDYKDHDGDYKDHDIDYKDDDDKAAAHHHHHH

SEQ ID NO: 294 - protein, 276 aa, Artificial Sequence
  TOPBP-1 (1) scFv antibody
EVQLLESGGGLVQPGGSLRLSCAASGFTFSGSSMSWVRQAPGKGLEWVSSISSGGSSTGYADSVKGRFTISRDNSKNTLYLQMNSLRAEDTAVYYCARFSWGHWSSFFDYWGQGTLVTVSSGGGGSGGGGSGGGGSDIQMTQSPSSLSASVGDRVTITCRASQSISSYLNWYQQKPGKAPKLLIYAASSLQSGVPSRFSGSGSGTDFTLTISSLQPEDFATYYCQQVYDLLTFGQGTKLEIKRLGDYKDHDGDYKDHDIDYKDDDDKAAAHHHHHH

SEQ ID NO: 295 - protein, 270 aa, Artificial Sequence
  TOPBP-1 (2) scFv antibody
  VARIANT 158..159: Any amino acids
  VARIANT 177..180: Any amino acids
  VARIANT 220..222: Any amino acids
  VARIANT 224..225: Any amino acids
EVQLLESGGGLVQPGGSLRLSCAASGFTFGSSSMSWVRQAPGKGLEWVSSISYGSSSTSYADSVKGRFTISRDNSKNTLYLQMNSLRAEDTAVYYCARGGYGFDYWGQGTLVTVSSGGGGSGGGGSGGGGSDIQMTQSPSSLSASVGDRVTITCRASXXLNWYQQKPGKAPKLLIYXXXXSLQSGVPSRFSGSGSGTDFTLTISSLQPEDFATYYCQQGXXXGXXTFGQGTKLEIKRLGDYKDHDGDYKDHDIDYKDDDDKAAAHHHHHH

SEQ ID NO: 296 - protein, 272 aa, Artificial Sequence
  USP-7 (1) scFv antibody
EVQLLESGGGLVQPGGSLRLSCAASGFTFGSSSMYWVRQAPGKGLEWVSSISYYGYSTYYADSVKGRFTISRDNSKNTLYLQMNSLRAEDTAVYYCARGSGIDYWGQGTLVTVSSGGGGSGGGGSGGGGSDIQMTQSPSSLSASVGDRVTITCRASQSISSYLNWYQQKPGKAPKLLIYAASSLQSGVPSRFSGSGSGTDFTLTISSLQPEDFATYYCQQWSVYGLYTFGQGTKLEIKRLGDYKDHDGDYKDHDIDYKDDDDKAAAHHHHHH

SEQ ID NO: 297 - protein, 271 aa, Artificial Sequence
  USP-7 (2) scFv antibody
EVQLLESGGGLVQPGGSLRLSCAASGFTFGGSSMYWVRQAPGKGLEWVSGISYYGYSTYYADSVKGRFTISRDNSKNTLYLQMNSLRAEDTAVYYCARGHSLDYWGQGTLVTVSSGGGGSGGGGSGGGGSDIQMTQSPSSLSASVGDRVTITCRASQSISSYLNWYQQKPGKAPKLLIYAASSLQSGVPSRFSGSGSGTDFTLTISSLQPEDFATYYCQQFSGYPHTFGQGTKLEIKRLGDYKDHDGDYKDHDIDYKDDDDKAAAHHHHHH

SEQ ID NO: 298 - protein, 271 aa, Artificial Sequence
  USP-7 (3) scFv antibody
EVQLLESGGGLVQPGGSLRLSCAASGFTFGSYSMYWVRQAPGKGLEWVSGISGYSYYTSYADSVKGRFTISRDNSKNTLYLQMNSLRAEDTAVYYCARSYYMDYWGQGTLVTVSSGGGGSGGGGSGGGGSDIQMTQSPSSLSASVGDRVTITCRASQSISSYLNWYQQKPGKAPKLLIYAASSLQSGVPSRFSGSGSGTDFTLTISSLQPEDFATYYCQQWDDSPHTFGQGTKLEIKRLGDYKDHDGDYKDHDIDYKDDDDKAAAHHHHHH

SEQ ID NO: 299 - protein, 283 aa, Artificial Sequence
  USP-7 (4) scFv antibody
EVQLLESGGGLVQPGGSLRLSCAASGFTFSSYAMSWVRQAPGKGLEWVSAISGSGGSTYYADSVKGRFTISRDNSKNTLYLQMNSLRAEDTAVYYCARVYSYPGPSSWGYFSSIDYWGQGTLVTVSSGGGGSGGGGSGGGGSDIQMTQSPSSLSASVGDRVTITCRASQSISSYLNWYQQKPGKAPKLLIYAASSLQSGVPSRFSGSGSGTDFTLTISSLQPEDFATYYCQQSYGYPHTFGQGTKLEIKRLGDYKDHDGDYKDHDIDYKDDDDKAAAHHHHHH

SEQ ID NO: 300 - protein, 275 aa, Artificial Sequence
  PARP-1 scFv antibody
EVQLLESGGGLVQPGGSLRLSCAASGFTFSGSGMGWVRQAPGKGLEWVSYIGYYSSGTYYADSVKGRFTISRDNSKNTLYLQMNSLRAEDTAVYYCARHHSFGYLDYWGQGTLVTVSSGGGGSGGGGSGGGGSDIQMTQSPSSLSASVGDRVTITCRASQSISSYLNWYQQKPGKAPKLLIYAASSLQSGVPSRFSGSGSGTDFTLTISSLQPEDFATYYCQQGVHWSLHTFGQGTKLEIKRLGDYKDHDGDYKDHDIDYKDDDDKAAAHHHHHH

SEQ ID NO: 301 - protein, 273 aa, Artificial Sequence
  GRIP-2 (1) scFv antibody
EVQLLESGGGLVQPGGSLRLSCAASGFTFSSYAMSWVRQAPGKGLEWVSAISGSGGSTYYADSVKGRFTISRDNSKNTLYLQMNSLRAEDTAVYYCARIHFYGLDYWGQGTLVTVSSGGGGSGGGGSGGGGSDIQMTQSPSSLSASVGDRVTITCRASQSISSYLNWYQQKPGKAPKLLIYAASSLQSGVPSRFSGSGSGTDFTLTISSLQPEDFATYYCQQSYSTPYTFGQGTKLEIKRLGDYKDHDGDYKDHDIDYKDDDDKAAAHHHHHH

SEQ ID NO: 302 - protein, 276 aa, Artificial Sequence
  GRIP-2 (2) scFv antibody
EVQLLESGGGLVQPGGSLRLSCAASGFTFSSYAMSWVRQAPGKGLEWVSAISGSGGSTYYADSVKGRFTISRDNSKNTLYLQMNSLRAEDTAVYYCARYVYYSYSYSFDYWGQGTLVTVSSGGGGSGGGGSGGGGSDIQMTQSPSSLSASVGDRVTITCRASQSISSYLNWYQQKPGKAPKLLIYAASSLQSGVPSRFSGSGSGTDFTLTISSLQPEDFATYYCQQSYYLPTFGQGTKLEIKRLGDYKDHDGDYKDHDIDYKDDDDKAAAHHHHHH

SEQ ID NO: 303 - protein, 272 aa, Artificial Sequence
  GRIP-2 (3) scFv antibody
EVQLLESGGGLVQPGGSLRLSCAASGFTFSSYAMSWVRQAPGKGLEWVSAISGSGGSTYYADSVKGRFTISRDNSKNTLYLQMNSLRAEDTAVYYCARSFHGFDYWGQGTLVTVSSGGGGSGGGGSGGGGSDIQMTQSPSSLSASVGDRVTITCRASQSISSYLNWYQQKPGKAPKLLIYAASSLQSGVPSRFSGSGSGTDFTLTISSLQPEDFATYYCQQYYSDPLTFGQGTKLEIKRLGDYKDHDGDYKDHDIDYKDDDDKAAAHHHHHH

SEQ ID NO: 304 - protein, 272 aa, Artificial Sequence
  GRIP-2 (4) scFv antibody
EVQLLESGGGLVQPGGSLRLSCAASGFTFSSYAMSWVRQAPGKGLEWVSAISGSGGSTYYADSVKGRFTISRDNSKNTLYLQMNSLRAEDTAVYYCARAHYGVIDYWGQGTLVTVSSGGGGSGGGGSGGGGSDIQMTQSPSSLSASVGDRVTITCRASQSISSYLNWYQQKPGKAPKLLIYAASSLQSGVPSRFSGSGSGTDFTLTISSLQPEDFATYYCQQYYGPFTFGQGTKLEIKRLGDYKDHDGDYKDHDIDYKDDDDKAAAHHHHHH

SEQ ID NO: 305 - protein, 274 aa, Artificial Sequence
  GRIP-2 (5) scFv antibody
EVQLLESGGGLVQPGGSLRLSCAASGFTFSSYAMSWVRQAPGKGLEWVSAISGSGGSTYYADSVKGRFTISRDNSKNTLYLQMNSLRAEDTAVYYCARVGPSYYYIDYWGQGTLVTVSSGGGGSGGGGSGGGGSDIQMTQSPSSLSASVGDRVTITCRASQSISSYLNWYQQKPGKAPKLLIYAASSLQSGVPSRFSGSGSGTDFTLTISSLQPEDFATYYCQQSYGPFTFGQGTKLEIKRLGDYKDHDGDYKDHDIDYKDDDDKAAAHHHHHH

SEQ ID NO: 306 - protein, 272 aa, Artificial Sequence
  GRIP-2 (6) scFv antibody
EVQLLESGGGLVQPGGSLRLSCAASGFTFSSYAMSWVRQAPGKGLEWVSAISGSGGSTYYADSVKGRFTISRDNSKNTLYLQMNSLRAEDTAVYYCARSHASYFDYWGQGTLVTVSSGGGGSGGGGSGGGGSDIQMTQSPSSLSASVGDRVTITCRASQSISSYLNWYQQKPGKAPKLLIYAASSLQSGVPSRFSGSGSGTDFTLTISSLQPEDFATYYCQQGYYLLTFGQGTKLEIKRLGDYKDHDGDYKDHDIDYKDDDDKAAAHHHHHH

SEQ ID NO: 307 - protein, 270 aa, Artificial Sequence
  GRIP-2 (7) scFv antibody
EVQLLESGGGLVQPGGSLRLSCAASGFTFSSYAMSWVRQAPGKGLEWVSAISGSGGSTYYADSVKGRFTISRDNSKNTLYLQMNSLRAEDTAVYYCARGSYMDYWGQGTLVTVSSGGGGSGGGGSGGGGSDIQMTQSPSSLSASVGDRVTITCRASQSISSYLNWYQQKPGKAPKLLIYAASSLQSGVPSRFSGSGSGTDFTLTISSLQPEDFATYYCQQSYGPPTFGQGTKLEIKRLGDYKDHDGDYKDHDIDYKDDDDKAAAHHHHHH

SEQ ID NO: 308 - protein, 272 aa, Artificial Sequence
  GRIP-2 (8) scFv antibody
EVQLLESGGGLVQPGGSLRLSCAASGFTFSSYAMSWVRQAPGKGLEWVSAISGSGGSTYYADSVKGRFTISRDNSKNTLYLQMNSLRAEDTAVYYCARHSGPFFDYWGQGTLVTVSSGGGGSGGGGSGGGGSDIQMTQSPSSLSASVGDRVTITCRASQSISSYLNWYQQKPGKAPKLLIYAASSLQSGVPSRFSGSGSGTDFTLTISSLQPEDFATYYCQQGYSLHTFGQGTKLEIKRLGDYKDHDGDYKDHDIDYKDDDDKAAAHHHHHH

SEQ ID NO: 309 - protein, 279 aa, Artificial Sequence
  MAD2L-1 (1) scFv antibody
  VARIANT 229..232: Any amino acids
EVQLLESGGGLVQPGGSLRLSCAASGFTFGSSYMGWVRQAPGKGLEWVSGISGGGYGTYYADSVKGRFTISRDNSKNTLYLQMNSLRAEDTAVYYCARAPGGHYYGYFYFDYWGQGTLVTVSSGGGGSGGGGSGGGGSDIQMTQSPSSLSASVGDRVTITCRASQSISSYLNWYQQKPGKAPKLLIYAASSLQSGVPSRFSGSGSGTDFTLTISSLQPEDFATYYCQQXXXXAHTFGQGTKLEIKRLGDYKDHDGDYKDHDIDYKDDDDKAAAHHHHHH

SEQ ID NO: 310 - protein, 274 aa, Artificial Sequence
  MAD2L-1 (2) scFv antibody
  VARIANT 227..228: Any amino acids
EVQLLESGGGLVQPGGSLRLSCAASGFTFYYSSMYWVRQAPGKGLEWVSGISSGGSGTYYADSVKGRFTISRDNSKNTLYLQMNSLRAEDTAVYYCARSFSYSSYLDYWGQGTLVTVSSGGGGSGGGGSGGGGSDIQMTQSPSSLSASVGDRVTITCRASQSISSYLNWYQQKPGKAPKLLIYAASSLQSGVPSRFSGSGSGTDFTLTISSLQPEDFATYYCQQGGXXPTFGQGTKLEIKRLGDYKDHDGDYKDHDIDYKDDDDKAAAHHHHHH

SEQ ID NO: 311 - protein, 273 aa, Artificial Sequence
  MAD2L-1 (3) scFv antibody
EVQLLESGGGLVQPGGSLRLSCAASGFTFYGSPMYWVRQAPGKGLEWVSYIGYGGYYTSYADSVKGRFTISRDNSKNTLYLQMNSLRAEDTAVYYCARGVYGFSIDYWGQGTLVTVSSGGGGSGGGGSGGGGSDIQMTQSPSSLSASVGDRVTITCRASQSISSYLNWYQQKPGKAPKLLIYAASSLQSGVPSRFSGSGSGTDFTLTISSLQPEDFATYYCQQYYYPLTFGQGTKLEIKRLGDYKDHDGDYKDHDIDYKDDDDKAAAHHHHHH

SEQ ID NO: 312 - protein, 274 aa, Artificial Sequence
  NDC80 (1) scFv antibody
EVQLLESGGGLVQPGGSLRLSCAASGFTFGYYYMSWVRQAPGKGLEWVSGIYSGSGSTSYADSVKGRFTISRDNSKNTLYLQMNSLRAEDTAVYYCARSPGYYYIDYWGQGTLVTVSSGGGGSGGGGSGGGGSDIQMTQSPSSLSASVGDRVTITCRASQSISSYLNWYQQKPGKAPKLLIYAASSLQSGVPSRFSGSGSGTDFTLTISSLQPEDFATYYCQQSYSTPYTFGQGTKLEIKRLGDYKDHDGDYKDHDIDYKDDDDKAAAHHHHHH

SEQ ID NO: 313 - protein, 278 aa, Artificial Sequence
  NDC80 (2) scFv antibody
EVQLLESGGGLVQPGGSLRLSCAASGFTFSGSSMYWVRQAPGKGLEWVSGIGSYGGYTYYADSVKGRFTISRDNSKNTLYLQMNSLRAEDTAVYYCARDGTAVGSYFYFDYWGQGTLVTVSSGGGGSGGGGSGGGGSDIQMTQSPSSLSASVGDRVTITCRASQSISSYLNWYQQKPGKAPKLLIYAASSLQSGVPSRFSGSGSGTDFTLTISSLQPEDFATYYCQQYYYYPHTFGQGTKLEIKRLGDYKDHDGDYKDHDIDYKDDDDKAAAHHHHHH

SEQ ID NO: 314 - protein, 277 aa, Artificial Sequence
  NDC80 (3) scFv antibody
EVQLLESGGGLVQPGGSLRLSCAASGFTFSSYAMSWVRQAPGKGLEWVSGIGSGGYYTSYADSVKGRFTISRDNSKNTLYLQMNSLRAEDTAVYYCARFYFVASPGGNLDYWGQGTLVTVSSGGGGSGGGGSGGGGSDIQMTQSPSSLSASVGDRVTITCRASQSISSYLNWYQQKPGKAPKLLIYAASSLQSGVPSRFSGSGSGTDFTLTISSLQPEDFATYYCQQYSSPPTFGQGTKLEIKRLGDYKDHDGDYKDHDIDYKDDDDKAAAHHHHHH

SEQ ID NO: 315 - protein, 270 aa, Artificial Sequence
  Spindly (1) scFv antibody
EVQLLESGGGLVQPGGSLRLSCAASGFTFSSYYMSWVRQAPGKGLEWVSSIDYSSYYTGYADSVKGRFTISRDNSKNTLYLQMNSLRAEDTAVYYCARGSYFDYWGQGTLVTVSSGGGGSGGGGSGGGGSDIQMTQSPSSLSASVGDRVTITCRASQSISSYLNWYQQKPGKAPKLLIYAASSLQSGVPSRFSGSGSGTDFTLTISSLQPEDFATYYCQQGSPLYTFGQGTKLEIKRLGDYKDHDGDYKDHDIDYKDDDDKAAAHHHHHH

SEQ ID NO: 316 - protein, 280 aa, Artificial Sequence
  Spindly (2) scFv antibody
EVQLLESGGGLVQPGGSLRLSCAASGFTFYSYYMGWVRQAPGKGLEWVSSISYSGSGTYYADSVKGRFTISRDNSKNTLYLQMNSLRAEDTAVYYCARASYGTSYYYGYTIDYWGQGTLVTVSSGGGGSGGGGSGGGGSDIQMTQSPSSLSASVGDRVTITCRASQSISSYLNWYQQKPGKAPKLLIYAASSLQSGVPSRFSGSGSGTDFTLTISSLQPEDFATYYCQQSYAGPSTFGQGTKLEIKRLGDYKDHDGDYKDHDIDYKDDDDKAAAHHHHHH

SEQ ID NO: 317 - protein, 278 aa, Artificial Sequence
  PTPRK (1) scFv antibody
EVQLLESGGGLVQPGGSLRLSCAASGFTFSYSGMSWVRQAPGKGLEWVSSIGGSSSYTYYADSVKGRFTISRDNSKNTLYLQMNSLRAEDTAVYYCARYSWGYYDAIDYWGQGTLVTVSSGGGGSGGGGSGGGGSDIQMTQSPSSLSASVGDRVTITCRASQSISSYLNWYQQKPGKAPKLLIYAASSLQSGVPSRFSGSGSGTDFTLTISSLQPEDFATYYCQQSWWGHALYTFGQGTKLEIKRLGDYKDHDGDYKDHDIDYKDDDDKAAAHHHHHH

SEQ ID NO: 318 - protein, 274 aa, Artificial Sequence
  PTPRK (2) scFv antibody
EVQLLESGGGLVQPGGSLRLSCAASGFTFSYYGMSWVRQAPGKGLEWVSYISYYSGSTYYADSVKGRFTISRDNSKNTLYLQMNSLRAEDTAVYYCARSSWSSSFDYWGQGTLVTVSSGGGGSGGGGSGGGGSDIQMTQSPSSLSASVGDRVTITCRASQSISSYLNWYQQKPGKAPKLLIYAASSLQSGVPSRFSGSGSGTDFTLTISSLQPEDFATYYCQQGYYGPFTFGQGTKLEIKRLGDYKDHDGDYKDHDIDYKDDDDKAAAHHHHHH

SEQ ID NO: 319 - protein, 275 aa, Artificial Sequence
  PTPRK (3) scFv antibody
EVQLLESGGGLVQPGGSLRLSCAASGFTFSYSGMGWVRQAPGKGLEWVSSISYGSYGTYYADSVKGRFTISRDNSKNTLYLQMNSLRAEDTAVYYCARYYYNGYFDYWGQGTLVTVSSGGGGSGGGGSGGGGSDIQMTQSPSSLSASVGDRVTITCRASQSISSYLNWYQQKPGKAPKLLIYAASSLQSGVPSRFSGSGSGTDFTLTISSLQPEDFATYYCQQYHYHSLFTFGQGTKLEIKRLGDYKDHDGDYKDHDIDYKDDDDKAAAHHHHHH

SEQ ID NO: 320 - protein, 277 aa, Artificial Sequence
  PTPRK (4) scFv antibody
EVQLLESGGGLVQPGGSLRLSCAASGFTFSSSYMGWVRQAPGKGLEWVSSIYSGYYSTSYADSVKGRFTISRDNSKNTLYLQMNSLRAEDTAVYYCARWASPDNSYWYLDYWGQGTLVTVSSGGGGSGGGGSGGGGSDIQMTQSPSSLSASVGDRVTITCRASQSISSYLNWYQQKPGKAPKLLIYAASSLQSGVPSRFSGSGSGTDFTLTISSLQPEDFATYYCQQAFYPHTFGQGTKLEIKRLGDYKDHDGDYKDHDIDYKDDDDKAAAHHHHHH

SEQ ID NO: 321 - protein, 273 aa, Artificial Sequence
  PTPRK (5) scFv antibody
EVQLLESGGGLVQPGGSLRLSCAASGFTFYSSYMGWVRQAPGKGLEWVSGIGSYGSYTSYADSVKGRFTISRDNSKNTLYLQMNSLRAEDTAVYYCARNWHRWFDYWGQGTLVTVSSGGGGSGGGGSGGGGSDIQMTQSPSSLSASVGDRVTITCRASQSISSYLNWYQQKPGKAPKLLIYAASSLQSGVPSRFSGSGSGTDFTLTISSLQPEDFATYYCQQGYYYPYTFGQGTKLEIKRLGDYKDHDGDYKDHDIDYKDDDDKAAAHHHHHH

SEQ ID NO: 322 - protein, 280 aa, Artificial Sequence
  PTPRK (6) scFv antibody
EVQLLESGGGLVQPGGSLRLSCAASGFTFGGYGMYWVRQAPGKGLEWVSSIYSGGSYTYYADSVKGRFTISRDNSKNTLYLQMNSLRAEDTAVYYCARGPGWVYGHSLDYWGQGTLVTVSSGGGGSGGGGSGGGGSDIQMTQSPSSLSASVGDRVTITCRASQSISSYLNWYQQKPGKAPKLLIYAASSLQSGVPSRFSGSGSGTDFTLTISSLQPEDFATYYCQQYNYYGYSLFTFGQGTKLEIKRLGDYKDHDGDYKDHDIDYKDDDDKAAAHHHHHH

SEQ ID NO: 323 - protein, 275 aa, Artificial Sequence
  PTPRK (7) scFv antibody
EVQLLESGGGLVQPGGSLRLSCAASGFTFYYSSMSWVRQAPGKGLEWVSSIGYGSGYTYYADSVKGRFTISRDNSKNTLYLQMNSLRAEDTAVYYCARVGASGSFDYWGQGTLVTVSSGGGGSGGGGSGGGGSDIQMTQSPSSLSASVGDRVTITCRASQSISSYLNWYQQKPGKAPKLLIYAASSLQSGVPSRFSGSGSGTDFTLTISSLQPEDFATYYCQQYHYYSLYTFGQGTKLEIKRLGDYKDHDGDYKDHDIDYKDDDDKAAAHHHHHH

SEQ ID NO: 324 - protein, 276 aa, Artificial Sequence
  PTPRK (8) scFv antibody
EVQLLESGGGLVQPGGSLRLSCAASGFTFSSSSMGWVRQAPGKGLEWVSYISGYSYYTYYADSVKGRFTISRDNSKNTLYLQMNSLRAEDTAVYYCARSSGTYGYYIDYWGQGTLVTVSSGGGGSGGGGSGGGGSDIQMTQSPSSLSASVGDRVTITCRASQSISSYLNWYQQKPGKAPKLLIYAASSLQSGVPSRFSGSGSGTDFTLTISSLQPEDFATYYCQQGSYFPSTFGQGTKLEIKRLGDYKDHDGDYKDHDIDYKDDDDKAAAHHHHHH

SEQ ID NO: 325 - protein, 273 aa, Artificial Sequence
  PTPRT (1) scFv antibody
EVQLLESGGGLVQPGGSLRLSCAASGFTFGGYSMSWVRQAPGKGLEWVSGISYGYGSTYYADSVKGRFTISRDNSKNTLYLQMNSLRAEDTAVYYCARGGPSYSMDYWGQGTLVTVSSGGGGSGGGGSGGGGSDIQMTQSPSSLSASVGDRVTITCRASQSISSYLNWYQQKPGKAPKLLIYAASSLQSGVPSRFSGSGSGTDFTLTISSLQPEDFATYYCQQSAYLSTFGQGTKLEIKRLGDYKDHDGDYKDHDIDYKDDDDKAAAHHHHHH

SEQ ID NO: 326 - protein, 273 aa, Artificial Sequence
  PTPRT (2) scFv antibody
EVQLLESGGGLVQPGGSLRLSCAASGFTFSSSGMYWVRQAPGKGLEWVSGIYSYGSYTSYADSVKGRFTISRDNSKNTLYLQMNSLRAEDTAVYYCARVNYFGIDYWGQGTLVTVSSGGGGSGGGGSGGGGSDIQMTQSPSSLSASVGDRVTITCRASQSISSYLNWYQQKPGKAPKLLIYAASSLQSGVPSRFSGSGSGTDFTLTISSLQPEDFATYYCQQSWHSPPTFGQGTKLEIKRLGDYKDHDGDYKDHDIDYKDDDDKAAAHHHHHH

SEQ ID NO: 327 - protein, 275 aa, Artificial Sequence
  PTPRT (3) scFv antibody
EVQLLESGGGLVQPGGSLRLSCAASGFTFSSYYMSWVRQAPGKGLEWVSGIYSGGSSTSYADSVKGRFTISRDNSKNTLYLQMNSLRAEDTAVYYCARWGSSDPPMDYWGQGTLVTVSSGGGGSGGGGSGGGGSDIQMTQSPSSLSASVGDRVTITCRASQSISSYLNWYQQKPGKAPKLLIYAASSLQSGVPSRFSGSGSGTDFTLTISSLQPEDFATYYCQQHAWSPYTFGQGTKLEIKRLGDYKDHDGDYKDHDIDYKDDDDKAAAHHHHHH

SEQ ID NO: 328 - protein, 277 aa, Artificial Sequence
  PGAM-5 (1) scFv antibody
EVQLLESGGGLVQPGGSLRLSCAASGFTFYSSYMYWVRQAPGKGLEWVSGISSYGGSTSYADSVKGRFTISRDNSKNTLYLQMNSLRAEDTAVYYCARYGPGSVFDYWGQGTLVTVSSGGGGSGGGGSGGGGSDIQMTQSPSSLSASVGDRVTITCRASQSISSYLNWYQQKPGKAPKLLIYAASSLQSGVPSRFSGSGSGTDFTLTISSLQPEDFATYYCQQVYVAYSYPYTFGQGTKLEIKRLGDYKDHDGDYKDHDIDYKDDDDKAAAHHHHHH

SEQ ID NO: 329 - protein, 274 aa, Artificial Sequence
  PGAM-5 (2) scFv antibody
EVQLLESGGGLVQPGGSLRLSCAASGFTFSGSYMYWVRQAPGKGLEWVSGISSSGDYTSYADSVKGRFTISRDNSKNTLYLQMNSLRAEDTAVYYCARVGYHSFFDYWGQGTLVTVSSGGGGSGGGGSGGGGSDIQMTQSPSSLSASVGDRVTITCRASQSISSYLNWYQQKPGKAPKLLIYAASSLQSGVPSRFSGSGSGTDFTLTISSLQPEDFATYYCQQYYWYLHTFGQGTKLEIKRLGDYKDHDGDYKDHDIDYKDDDDKAAAHHHHHH

SEQ ID NO: 330 - protein, 272 aa, Artificial Sequence
  PGAM-5 (3) scFv antibody
EVQLLESGGGLVQPGGSLRLSCAASGFTFYSYGMSWVRQAPGKGLEWVSSISYGSYYTYYADSVKGRFTISRDNSKNTLYLQMNSLRAEDTAVYYCARGYGYLDYWGQGTLVTVSSGGGGSGGGGSGGGGSDIQMTQSPSSLSASVGDRVTITCRASQSISSYLNWYQQKPGKAPKLLIYAASSLQSGVPSRFSGSGSGTDFTLTISSLQPEDFATYYCQQYYYYPHTFGQGTKLEIKRLGDYKDHDGDYKDHDIDYKDDDDKAAAHHHHHH

SEQ ID NO: 331 - protein, 274 aa, Artificial Sequence
  PGAM-5 (4) scFv antibody
EVQLLESGGGLVQPGGSLRLSCAASGFTFGGYSMGWVRQAPGKGLEWVSSISSYSSYTYYADSVKGRFTISRDNSKNTLYLQMNSLRAEDTAVYYCARSYSFGPWLDYWGQGTLVTVSSGGGGSGGGGSGGGGSDIQMTQSPSSLSASVGDRVTITCRASQSISSYLNWYQQKPGKAPKLLIYAASSLQSGVPSRFSGSGSGTDFTLTISSLQPEDFATYYCQQGYYLFTFGQGTKLEIKRLGDYKDHDGDYKDHDIDYKDDDDKAAAHHHHHH

SEQ ID NO: 332 - protein, 277 aa, Artificial Sequence
  PTPRJ (1) scFv antibody
EVQLLESGGGLVQPGGSLRLSCAASGFTFSSYAMSWVRQAPGKGLEWVSYISSSGGYTYYADSVKGRFTISRDNSKNTLYLQMNSLRAEDTAVYYCARWAPWPYGYSMDYWGQGTLVTVSSGGGGSGGGGSGGGGSDIQMTQSPSSLSASVGDRVTITCRASQSISSYLNWYQQKPGKAPKLLIYAASSLQSGVPSRFSGSGSGTDFTLTISSLQPEDFATYYCQQSSYSLSTFGQGTKLEIKRLGDYKDHDGDYKDHDIDYKDDDDKAAAHHHHHH

SEQ ID NO: 333 - protein, 272 aa, Artificial Sequence
  PTPRJ (2) scFv antibody
EVQLLESGGGLVQPGGSLRLSCAASGFTFSGGSMSWVRQAPGKGLEWVSSIGYYSGYTSYADSVKGRFTISRDNSKNTLYLQMNSLRAEDTAVYYCARGYYYFDYWGQGTLVTVSSGGGGSGGGGSGGGGSDIQMTQSPSSLSASVGDRVTITCRASQSISSYLNWYQQKPGKAPKLLIYAASSLQSGVPSRFSGSGSGTDFTLTISSLQPEDFATYYCQQGHGYLFTFGQGTKLEIKRLGDYKDHDGDYKDHDIDYKDDDDKAAAHHHHHH

SEQ ID NO: 334 - protein, 273 aa, Artificial Sequence
  PTPRJ (3) scFv antibody
EVQLLESGGGLVQPGGSLRLSCAASGFTFSSYAMSWVRQAPGKGLEWVSYISSSSSSTSYADSVKGRFTISRDNSKNTLYLQMNSLRAEDTAVYYCARYWHSHYLDYWGQGTLVTVSSGGGGSGGGGSGGGGSDIQMTQSPSSLSASVGDRVTITCRASQSISSYLNWYQQKPGKAPKLLIYAASSLQSGVPSRFSGSGSGTDFTLTISSLQPEDFATYYCQQYWYPYTFGQGTKLEIKRLGDYKDHDGDYKDHDIDYKDDDDKAAAHHHHHH

SEQ ID NO: 335 - protein, 269 aa, Artificial Sequence
  PTPRJ (4) scFv antibody
EVQLLESGGGLVQPGGSLRLSCAASGFTFSYSYMGWVRQAPGKGLEWVSGIYGYGYSTYADSVKGRFTISRDNSKNTLYLQMNSLRAEDTAVYYCARGVWMDYWGQGTLVTVSSGGGGSGGGGSGGGGSDIQMTQSPSSLSASVGDRVTITCRASQSISSYLNWYQQKPGKAPKLLIYAASSLQSGVPSRFSGSGSGTDFTLTISSLQPEDFATYYCQQNHSLYTFGQGTKLEIKRLGDYKDHDGDYKDHDIDYKDDDDKAAAHHHHHH

SEQ ID NO: 336 - protein, 273 aa, Artificial Sequence
  PTPRJ (5) scFv antibody
EVQLLESGGGLVQPGGSLRLSCAASGFTFYGSYMSWVRQAPGKGLEWVSSIYSGGGYTYYADSVKGRFTISRDNSKNTLYLQMNSLRAEDTAVYYCARSSRYYYMDYWGQGTLVTVSSGGGGSGGGGSGGGGSDIQMTQSPSSLSASVGDRVTITCRASQSISSYLNWYQQKPGKAPKLLIYAASSLQSGVPSRFSGSGSGTDFTLTISSLQPEDFATYYCQQSWVPHTFGQGTKLEIKRLGDYKDHDGDYKDHDIDYKDDDDKAAAHHHHHH

SEQ ID NO: 337 - protein, 271 aa, Artificial Sequence
  PTPRJ (6) scFv antibody
EVQLLESGGGLVQPGGSLRLSCAASGFTFGSYSMYWVRQAPGKGLEWVSSISSSSYGTYYADSVKGRFTISRDNSKNTLYLQMNSLRAEDTAVYYCARGVFLDYWGQGTLVTVSSGGGGSGGGGSGGGGSDIQMTQSPSSLSASVGDRVTITCRASQSISSYLNWYQQKPGKAPKLLIYAASSLQSGVPSRFSGSGSGTDFTLTISSLQPEDFATYYCQQGYYSLYTFGQGTKLEIKRLGDYKDHDGDYKDHDIDYKDDDDKAAAHHHHHH

SEQ ID NO: 338 - protein, 274 aa, Artificial Sequence
  PTPRJ (7) scFv antibody
EVQLLESGGGLVQPGGSLRLSCAASGFTFSSGGMSWVRQAPGKGLEWVSSIYYSSSSTSYADSVKGRFTISRDNSKNTLYLQMNSLRAEDTAVYYCARGYGYYMDYWGQGTLVTVSSGGGGSGGGGSGGGGSDIQMTQSPSSLSASVGDRVTITCRASQSISSYLNWYQQKPGKAPKLLIYAASSLQSGVPSRFSGSGSGTDFTLTISSLQPEDFATYYCQQGSYAYLSTFGQGTKLEIKRLGDYKDHDGDYKDHDIDYKDDDDKAAAHHHHHH

SEQ ID NO: 339 - protein, 280 aa, Artificial Sequence
  PTPRJ (8) scFv antibody
EVQLLESGGGLVQPGGSLRLSCAASGFTFSSGGMYWVRQAPGKGLEWVSSIYGSSSSTYYADSVKGRFTISRDNSKNTLYLQMNSLRAEDTAVYYCARGPYASGYYYLDYWGQGTLVTVSSGGGGSGGGGSGGGGSDIQMTQSPSSLSASVGDRVTITCRASQSISSYLNWYQQKPGKAPKLLIYAASSLQSGVPSRFSGSGSGTDFTLTISSLQPEDFATYYCQQVNYSSSYPFTFGQGTKLEIKRLGDYKDHDGDYKDHDIDYKDDDDKAAAHHHHHH
